(19) United States
(12) Patent Application Publication
(10) Pub. No.: US 2018/0161443 A1
(43) Pub. Date: Jun. 14, 2018

(54) GROWTH HORMONE POLYPEPTIDES AND METHODS OF MAKING AND USING SAME

(71) Applicant: Amunix Operating Inc., Mountain View, CA (US)

(72) Inventors: Volker Schellenberger, Palo Alto, CA (US); Joshua Silverman, Sunnyvale, CA (US); Willem P. Stemmer, Los Gatos, CA (US); Chia-wei Wang, Milpitas, CA (US); Nathan Geething, Santa Clara, CA (US); Jeffrey L. Cleland, San Carlos, CA (US); Benjamin Spink, San Carlos, CA (US)

(21) Appl. No.: 15/807,291

(22) Filed: Nov. 8, 2017

Related U.S. Application Data
(63) Continuation of application No. 14/843,143, filed on Sep. 2, 2015, now Pat. No. 9,849,188.
Application No. 14/843,143 is a continuation of application No. 14/152,692, filed on Jan. 10, 2014, now Pat. No. 9,168,312.
Application No. 14/152,692 is a continuation of application No. 12/796,640, filed on Jun. 8, 2010, now Pat. No. 8,703,717.
Application No. 12/796,640 is a continuation of application No. 12/699,761, filed on Feb. 3, 2010, now Pat. No. 8,673,860.
Application No. 12/699,761 is a continuation of application No. PCT/US10/23106, filed on Feb. 3, 2010.
(60) Provisional application No. 61/185,112, filed on Jun. 8, 2009.
(60) Provisional application No. 61/236,836, filed on Aug. 25, 2009.
(60) Provisional application No. 61/280,955, filed on Nov. 10, 2009.

(51) Int. Cl. A61K 47/64; C07K 14/00; C07K 14/61; C12P 21/06; A61K 38/00

(52) U.S. Cl. CPC A61K 47/64; C07K 14/001; C07K 14/61; C07K 2319/00; A61K 38/00; C07K 2319/31; C07K 2319/75; C12P 21/06

(57) ABSTRACT

The present invention relates to compositions comprising growth hormone linked to extended recombinant polypeptide (XTEN), isolated nucleic acids encoding the compositions and vectors and host cells containing the same, and methods of making and using such compositions in treatment of growth hormone-related diseases, disorders, and conditions.

### CROSS-REFERENCE TO RELATED APPLICATIONS

[0001] This application is a Continuation Application, which claims the priority benefit to U.S. patent application Ser. No. 14/843,143, filed on Sep. 2, 2015, which claims the priority benefit of U.S. application Ser. No. 14/152,692, filed Jan. 10, 2014, now U.S. Pat. No. 9,168,312, which is a Continuation Application which claims the priority benefit of U.S. application Ser. No. 12/796,640, filed Jun. 8, 2010, now U.S. Pat. No. 8,703,717; which claim the benefit of U.S. Provisional Application Ser. No. 61/185,112, filed Jun. 8, 2009; 61/236,836, filed Aug. 25, 2009; and 61/280,955, filed Nov. 10, 2009, and U.S. application Ser. No. 12/699,761, filed Feb. 3, 2010, now U.S. Pat. No. 8,673,860, and PCT Application Serial No. PCT/US10/23106, both filed Feb. 3, 2010 which are hereby incorporated herein by reference in their entirety.

### SEQUENCE LISTING

[0002] The instant application contains a Sequence Listing which has been submitted in ASCII format via EFS-Web and is hereby incorporated by reference in its entirety. Said ASCII copy, created on Dec. 22, 2017 is named 32808-716.304.SeqList.txt and is 1,801,534 bytes in size.

### STATEMENT REGARDING FEDERALLY SPONSORED RESEARCH

[0003] This invention was made with government support under SBIR grant 2R44GM079873-02 awarded by the National Institutes of Health. The government has certain rights in the invention.

### BACKGROUND OF THE INVENTION

[0004] Human growth hormone (hGH) is a hormone that participates in the regulation of human growth and development. Growth Hormone (herein after “GH”), also known as somatotrophin, represents a class of proteinaceous hormones produced and secreted by the somatotropic cells of the anterior pituitary. Secretion of GH is stimulated by the growth hormone releasing hormone (GHRH) from the hypothalamus and suppressed by somatostatin. This pituitary hormone exhibits a number of biological effects including somatogenesis, lactation, activation of macrophages, insulin-like and diabetogenic effects among others (Chawla, R. K. (1983) Ann. Rev. Med. 34, 519; Edwards, C. K. et al. (1988) Science 239, 769; Thorner, M. O., et al. (1988) J. Clin. Invest. 81, 745). Human growth hormone is a member of a family of homologous hormones that include placental lactogens, prolactins, and other genetic and species variants of GH. GH regulates the secretion of Insulin-like growth factor (IGF-1, formerly known as somatomedin C), among other peptide hormones known collectively as somatomedins, which accounts for most of its biological activity.

[0005] A number of diseases and disorders are associated with the deficiency of GH. A deficiency can be congenital, acquired in childhood or in adult life, and can be partial or complete. In some cases, the deficiency is transient, but more commonly is permanent, and may occur in association with deficiencies of other pituitary hormones. Growth hormone deficiency in children leads to dwarfism, growth failure or short stature. Deficiency in adults is rare, but symptoms can include diminished body mass and poor bone density, and a number of psychological symptoms. Other hormonal or glandular disorders frequently coincide with deficiency of growth hormone.

[0006] Stimulating the increase in height in childhood is the most widely known effect of GH, and appears to function by at least two mechanisms: GH directly stimulates division and multiplication of chondrocytes of cartilage, and GH also stimulates production of IGF-1. IGF-1 has growth-stimulating effects on a wide variety of tissues. Additional IGF-1 is generated within target tissues, making it apparently both an endocrine and an autocrine/paracrine hormone. IGF-1 also has stimulatory effects on osteoblast and chondrocyte activity to promote bone growth.

[0007] Human growth hormone (hGH) plays a key role in somatic growth through its effects on the metabolism of proteins, carbohydrates and lipids. In addition to its effects on somatic growth, hGH has been shown to stimulate blood cells in vitro (Derfalvi et al., 1998; Merchav et al; 1988), to increase erythrocytes and hemoglobin counts (Valerio et al., 1997; Vihervuori et al., 1996), to enhance both proliferation and Ig production in plasma cell lines (Kimata and Yoshida, 1994) and to stimulate CD8⁺ cell counts and, to a lesser extent CD4⁺ cell counts (Geffner, 1997).

[0008] Injectable forms of GH have been marketed for GH deficiency in children and adults, Turner Syndrome, Prader-Willi Syndrome, and children small for gestational age. In addition, it has seen use in the battle against aging and for weight management, as well as the mobilization of cells capable of regenerating hematopoiesis in the peripheral blood.

[0009] The 22 kDA molecular weight of hGH is well below the threshold value for kidney filtration of about 70 kDa (Caliceti (2003) Adv Drug Deliv Rev 55:1261-1277), which contributes to the serum half-life of native hGH being less than 20 minutes in humans. Thus, commercial preparations of hGH must be dosed daily to achieve clinical benefit. A sustained-release form of GH, Nutropin Depot (Genentech and Alkermes) was approved by the FDA in 1999, allowing for fewer injections (every 2 or 4 weeks instead of daily); however, the product was discontinued in 2004.

[0010] Chemical modifications to a therapeutic protein can modify its in vivo clearance rate and subsequent serum half-life. One example of a common modification is the addition of a polyethylene glycol (PEG) moiety, typically coupled to the protein via an aldehyde or N-hydroxysuccinimide (NHS) group on the PEG reacting with an amine group (e.g. lysine side chain or the N-terminus). However, the conjugation step can result in the formation of heterogeneous product mixtures that need to be separated, leading to significant product loss and complexity of manufacturing and does not result in a completely chemically-uniform product. Also, the pharmacologic function of GH may be hampered if amino acid side chains in the vicinity of its binding site become modified by the PEGylation process. Other approaches include the genetic fusion of an Fc domain to the therapeutic GH protein. Conjugation of the Fc domain increases the size of the therapeutic protein, hence reducing the rate of clearance through the kidney. Additionally, the Fc domain confers the ability to bind to, and be recycled from lysosomes by, the FcRn receptor, which results in increased pharmacokinetic half-life. Unfortunately, the Fc domain does not fold efficiently during recombinant expression, and tends to form insoluble precipitates known as inclusion bodies. These inclusion bodies must be solubilized and functional protein must be renatured from the misfolded aggregate, a time-consuming, inefficient, and expensive process. Accordingly, there remains a need for growth hormone compositions that can increase the half-life and can be administered less frequently, but are safer and less complicated and costly to produce.

### SUMMARY OF THE INVENTION

[0011] The present disclosure is directed to compositions and methods that can be useful for or the treatment of any disease, disorder or condition that is improved, ameliorated, or inhibited by the administration of growth hormone. In particular, the present invention provides compositions of fusion proteins comprising one or more extended recombinant polypeptides with a non-repetitive sequence and/or unstructured conformation (XTEN) linked to growth hormone (GH). In part, the present disclosure is directed to pharmaceutical compositions comprising the fusion proteins and the uses thereof for treating growth hormone-related diseases, disorders or conditions.

[0012] In one embodiment, the invention provides an isolated fusion protein, comprising a growth hormone that is at least about 90%, or about 95%, or about 96%, or about 97%, or about 98%, or about 99% identical to an amino acid sequence selected from Table 1, wherein said growth hormone is linked to an extended recombinant polypeptide (XTEN) of at least about 100, or at least about 200, or at least about 400, or at least about 800, or at least about 900, or at least about 1000, or at least about 2000, up to about 3000 amino acids residues, wherein the XTEN is characterized in that (a) the XTEN comprises at least about 200 contiguous amino acids that exhibits at least about 90%, or about 95%, or about 96%, or about 97%, or about 98%, or about 99% identical to a comparable length of an amino acid sequence selected from a sequence shown in Table 3; (b) the XTEN sequence lacks a predicted T-cell epitope when analyzed by TEPITOPE algorithm, wherein the TEPITOPE algorithm prediction for epitopes within the XTEN sequence is based on a score of −5, or −6, or −7, or −8, or −9 or greater; (c) the XTEN has a subsequence score of less than 10, or less than 9, or less than 8, or less than 7, or less than 6, or less than 5, or even less; and (d) the sum of glycine (G), alanine (A), serine (S), threonine (T), glutamate (E) and proline (P) residues constitutes more than about 90%, or about 95%, or about 96%, or about 97%, or about 98%, or about 99% of the total amino acid residues of the XTEN. In one embodiment, the growth hormone of the isolated fusion protein is human growth hormone. In another embodiment, the isolated fusion protein comprises at least a second XTEN, wherein the fusion protein adopts a multiple-XTEN configuration shown in Table 5, or a variant thereof.

[0013] In another embodiment, the XTEN sequence of the GHXTEN fusion proteins is characterized in that is has greater than 90% random coil formation, or about 95%, or about 96%, or about 97%, or about 98%, or about 99% random coil formation as determined by GOR algorithm; and the XTEN sequence has less than 2% alpha helices and 2% beta-sheets as determined by the Chou-Fasman algorithm.

[0014] In another embodiment, the invention provides GHXTEN fusion proteins, wherein the XTEN is characterized in that the sum of asparagine and glutamine residues is less than 10% of the total amino acid sequence of the XTEN, the sum of methionine and tryptophan residues is less than 2% of the total amino acid sequence of the XTEN, the XTEN sequence has less than 5% amino acid residues with a positive charge, the XTEN sequence has greater than 90% random coil formation, or about 95%, or about 96%, or about 97%, or about 98%, or about 99% random coil formation as determined by GOR algorithm; and the XTEN sequence has less than 2% alpha helices and 2% beta-sheets as determined by the Chou-Fasman algorithm.

[0015] In another embodiment, the invention provides GHXTEN fusion proteins, wherein the XTEN is characterized in that at least about 80%, or at least about 90%, or at least about 91%, or at least about 92%, or at least about 93%, or at least about 94%, or at least about 95%, or at least about 96%, or at least about 97%, or at least about 98%, or at least about 99% of the XTEN sequence consists of non-overlapping sequence motifs wherein each of the sequence motifs has about 9 to about 14 amino acid residues and wherein the sequence of any two contiguous amino acid residues does not occur more than twice in each of the sequence motifs the sequence motifs consist of four to six types of amino acids selected from glycine (G), alanine (A), serine (S), threonine (T), glutamate (E) and proline (P).

[0016] In some embodiments, no one type of amino acid constitutes more than 30% of the XTEN sequence of the GHXTEN. In other embodiments, the XTEN has a sequence in which no three contiguous amino acids are identical unless the amino acid is serine, in which case no more than three contiguous amino acids are serine residues. In still other embodiments, at least about 80%, or about 90%, or about 95%, or about 96%, or about 97%, or about 98%, or about 99%, or 100% of the XTEN sequence consists of non-overlapping sequence motifs, wherein each of the sequence motifs has 12 amino acid residues. In one embodiment, the XTEN sequence consists of non-overlapping sequence motifs, wherein the sequence motifs are from one or more sequences of Table 2.

[0017] In some embodiments, GHXTEN fusion proteins exhibits enhanced pharmacokinetic properties compared to GH not linked to XTEN, wherein the enhanced properties include but are not limited to longer terminal half-life, larger area under the curve, increased time in which the blood concentration remains within the therapeutic window, increased time between consecutive doses, and decreased dose in moles over time. In some embodiments, the terminal half-life of the GHXTEN fusion protein administered to a subject is increased at least about two fold, or at least about three-fold, or at least about four-fold, or at least about five-fold, or at least about six-fold, or at least about eight-fold, or at least about ten-fold, or at least about 20-fold, or at least about 40-fold, or at least about 60-fold, or at least about 100-fold, or even higher as compared to GH not linked to XTEN and administered to a subject at a comparable dose. In other embodiments, the enhanced pharmacokinetic property is reflected by the fact that the blood concentrations that remain within the therapeutic window for the GHXTEN fusion protein for a given period are at least about two fold, or at least about three-fold, or at least about four-fold, or at least about five-fold, or at least about six-fold, or at least about eight-fold, or at least about ten-fold longer, or at least about 20-fold, or at least about 40-fold, or at least about 60-fold, or at least about 100-fold compared to GH not linked to XTEN and administered to a subject at a comparable dose. The increase in half-life and time spent within the therapeutic window permits less frequent dosing and decreased amounts of the fusion protein (in moles equivalent) that are administered to a subject, compared to the corresponding GH not linked to XTEN. In one embodiment, the therapeutically effective dose regimen results in a gain in time of at least two-fold, or at least three-fold, or at least four-fold, or at least five-fold, or at least six-fold, or at least eight-fold, or at least 10-fold, or at least about 20-fold, or at least about 40-fold, or at least about 60-fold, or at least about 100-fold between at least two consecutive Cₘₐₓ peaks and/or Cₘᵢₙ troughs for blood levels of the fusion protein compared to the corresponding GH not linked to the fusion protein and administered using a comparable dose regimen to a subject.

[0018] In some embodiments, the XTEN enhances thermostability of a biologically active protein when linked to the biologically active protein wherein the thermostability is ascertained by measuring the retention of biological activity after exposure to a temperature of about 37° C. for at least about 7 days of the biologically active protein in comparison to the XTEN linked to the biologically active protein. In one embodiment of the foregoing, the retention of biological activity in increased by at least about 50%, at least about 60%, at least about 70%, at least about 80%, at least about 90%, at least about 100%, or about 150%, at least about 200%, at least about 300%, or about 500% longer compared to the GH not linked to the XTEN comprises of the XTEN.

[0019] In some embodiments, the isolated fusion protein with at least a first XTEN comprises a GH wherein the GH is human growth hormone. In some embodiments, the isolated fusion protein further comprises a second XTEN, which can be identical or can be different from the first XTEN, and wherein the fusion protein adopts a multiple-XTEN configuration shown in Table 5. In one embodiment of the foregoing, the first and the second XTEN can each be a sequence selected from Table 3, or can exhibit at least at least about 80%, or at least about 90%, or at least about 91%, or at least about 92%, or at least about 93%, or at least about 94%, or at least about 95%, or at least about 96%, or at least about 97%, or at least about 98%, or at least about 99% or 100% sequence identity to a sequence selected from Table 3. In another embodiment, the isolated fusion protein compring a second XTEN sequence adopts a multiple-XTEN configuration shown in Table 5.

[0020] In one embodiment, the isolated fusion protein is less immunogenic compared to the GH not linked to the XTEN, wherein immunogenicity is ascertained by, e.g., measuring production of IgG antibodies selectively binding to the biologically active protein after administration of comparable doses to a subject.

[0021] In some embodiments, the growth hormone peptide and the XTEN of the fusion protein is linked via a spacer, wherein the spacer sequence comprises between about 1 to about 50 amino acid residues that optionally comprises a cleavage sequence. In one embodiment, the cleavage sequence is susceptible to cleavage by a protease. Non-limiting examples of such protease include FXIa, FXIIa, kallikrein, FVIIa, FIXa, FXa, thrombin, elastase-2, granzyme B, MMP-12, MMP-13, MMP-17 or MMP-20, TEV, enterokinase, rhinovirus 3C protease, and sortase A.

[0022] In some embodiments, the isolated fusion protein is configured to have reduced binding affinity for a target receptor of the corresponding GH, as compared to the corresponding GH not linked to the fusion protein. In one embodiment, the GHXTEN fusion protein exhibits binding affinity for a target receptor of the GH in the range of about 0.01%-30%, or about 0.1% to about 20%, or about 1% to about 15%, or about 2% to about 10% of the binding affinity of the corresponding GH that lacks the XTEN. In another embodiment, the GHXTEN fusion protein exhibits binding affinity for a target receptor of the GH that is reduced at least about 3-fold, or at least about 5-fold, or at least about 6-fold, or at least about 7-fold, or at least about 8-fold,or at least about 9-fold, or at least about 10-fold, or at least about 12-fold, or at least about 15-fold, or at least about 17-fold, or at least about 20-fold, or at least about 30-fold, or at least about 50-fold, or at least about 100-fold less binding affinity compared to GH not linked to XTEN. In a related embodiment, a fusion protein with reduced affinity can have reduced receptor-mediated clearance and a corresponding increase in half-life of at least about 3-fold, or at least about 5-fold, or at least about 6-fold, or at least about 7-fold, or at least about 8-fold,or at least about 9-fold, or at least about 10-fold, or at least about 12-fold, or at least about 15-fold, or at least about 17-fold, or at least about 20-fold, or at least about 30-fold, or at least about 50-fold, or at least about 100-fold longer compared to the corresponding GH that is not linked to the fusion protein.

[0023] In one embodiment, the invention provides an isolated GHXTEN fusion protein comprising an amino acids sequence that has at least about 80%, or at least about 90%, or at least about 91%, or at least about 92%, or at least about 93%, or at least about 94%, or at least about 95%, or at least about 96%, or at least about 97%, or at least about 98%, or at least about 99%, or 100% sequence identity to a sequence selected from Table 35, Table 36, and Table 37.

[0024] In some embodiments, the invention provides GHXTEN fusion proteins wherein the GHXTEN exhibits increased solubility of at least three-fold, or at least about four-fold, or at least about five-fold, or at least about six-fold, or at least about seven-fold, or at least about eight-fold, or at least about nine-fold, or at least about ten-fold, or at least about 15-fold, or at least a 20-fold, or at least 40-fold, or at least 60-fold at physiologic conditions compared to the GH not linked to the fusion protein.

[0025] In some embodiments, GHXTEN fusion proteins exhibit an increased apparent molecular weight as determined by size exclusion chromatography, compared to the actual molecular weight, wherein the apparent molecular weight is at least about 100 kD, or at least about 150 kD, or at least about 200 kD, or at least about 300 kD, or at least about 400 kD, or at least about 500 kD, or at least about 600kD, or at least about 700 kD, while the actual molecular weight of each GH component of the fusion protein is less than about 25 kD. Accordingly, the GHXTEN fusion proteins can have an Apparent Molecular Weight that is about 4-fold greater, or about 5-fold greater, or about 6-fold greater, or about 7-fold greater, or about 8-fold greater than the actual molecular weight of the fusion protein. In some cases, the isolated GHXTEN fusion protein of the foregoing embodiments exhibits an apparent molecular weight factor under physiologic conditions that is greater than about 4, or about 5, or about 6, or about 7, or about 8.

[0026] The invention contemplates GHXTEN fusion proteins compositions comprising, but not limited to GH selected from Table 1 (or fragments or sequence variants thereof), XTEN selected from Table 3 (or sequence variants thereof) that are in a configuration selected from Table 5. Generally, the resulting GHXTEN will retain at least a portion of the biological activity of the corresponding GH not linked to the XTEN. In other cases, the GH component either becomes biologically active or has an increase in activity upon its release from the XTEN by cleavage of an optional cleavage sequence incorporated within spacer sequences into the GHXTEN.

[0027] In one embodiment of the GHXTEN composition, the invention provides a fusion protein of formula I:

(XTEN)ₓ-GH-(XTEN)_{y} I

wherein independently for each occurrence, GH is a is a growth hormone; x is either 0 or 1 and y is either 0 or 1 wherein x+y≥1; and XTEN is an extended recombinant polypeptide.

[0028] In some embodiments, the XTEN is fused to the growth hormone on an N- or C-terminus of the growth hormone. In some embodiments, the isolated fusion protein comprises a human growth hormone and a first and a second XTEN selected from AE912, AM923, AE144, and AE288.

[0029] In another embodiment of the GHXTEN composition, the invention provides a fusion protein of formula II:

(XTEN)ₓ-(GH)-(S)_{y}-(XTEN)_{y} II

wherein independently for each occurrence, GH is a is a growth hormone; S is a spacer sequence having between 1 to about 50 amino acid residues that can optionally include a cleavage sequence; x is either 0 or 1 and y is either 0 or 1 wherein x+y≥1; and XTEN is an extended recombinant polypeptide.

[0030] In another embodiment, the invention provides an isolated fusion protein, wherein the fusion protein is of formula III:

(GH)-(S)ₓ-(XTEN)-(S)_{y}-(GH)-(S)_{z}-(XTEN)_{z} III

wherein independently for each occurrence, GH is a is a growth hormone; S is a spacer sequence having between 1 to about 50 amino acid residues that can optionally include a cleavage sequence; x is either 0 or 1; y is either 0 or 1; z is either 0 or 1; and XTEN is an extended recombinant polypeptide.

[0031] In another embodiment, the invention provides an isolated fusion protein, wherein the fusion protein is of formula IV:

(XTEN)ₓ-(S)_{y}-(GH)-(S)_{z}-(XTEN)-(GH) IV

wherein independently for each occurrence, GH is a is a growth hormone; S is a spacer sequence having between 1 to about 50 amino acid residues that can optionally include a cleavage sequence; x is either 0 or 1; y is either 0 or 1; z is either 0 or 1; and XTEN is an extended recombinant polypeptide.

[0032] In another embodiment, the invention provides an isolated fusion growth hormone, wherein the fusion protein is of formula V:

(GH)ₓ-(S)ₓ-(GH)-(S)_{y}-(XTEN) V

wherein independently for each occurrence, GH is a is a growth hormone; S is a spacer sequence having between 1 to about 50 amino acid residues that can optionally include a cleavage sequence; x is either 0 or 1; y is either 0 or 1; and XTEN is an extended recombinant polypeptide.

[0033] In another embodiment, the invention provides an isolated fusion protein, wherein the fusion protein is of formula VI:

(XTEN)-(S)ₓ-(GH)-(S)_{y}-(GH) VI

wherein independently for each occurrence, GH is a is a growth hormone; S is a spacer sequence having between 1 to about 50 amino acid residues that can optionally include a cleavage sequence; x is either 0 or 1; y is either 0 or 1; and XTEN is an extended recombinant polypeptide.

[0034] In another embodiment, the invention provides an isolated fusion protein, wherein the fusion protein is of formula VII:

(XTEN)-(S)ₓ-(GH)-(S)_{y}-(GH)-(XTEN) VII

wherein independently for each occurrence, GH is a is a growth hormone; S is a spacer sequence having between 1 to about 50 amino acid residues that can optionally include a cleavage sequence; x is either 0 or 1; y is either 0 or 1; and XTEN is an extended recombinant polypeptide.

[0035] In another embodiment, the invention provides an isolated fusion protein, wherein the fusion protein is of formula VIII:

((S)ₘ-(GH)ₓ-(S)ₙ-(XTEN)_{y}-(S)ₒ)ₜ VIII

wherein t is an integer that is greater than 0 (1, 2, 3, etc.); independently each of m, n, o, x, and y is an integer (0, 1, 2, 3, etc.), GH is a is a growth hormone; S is an spacer, optionally comprises a cleavage site; and XTEN is an extended recombinant polypeptide, with the proviso that: (1) x+y>1, (2) when t=1, x>0 and y>0, (3) when there is more than one GH, S, or XTEN, each GH, XTEN, or S are the same or are independently different; and (4) when t>1, each m, n, o, x, or y within each subunit are the same or are independently different.

[0036] In some embodiments, administration of a therapeutically effective dose of a fusion protein of an embodiment of formulas I-VIII to a subject in need thereof can result in a gain in time of at least two-fold, or at least three-fold, or at least four-fold, or at least five-fold or more spent within a therapeutic window for the fusion protein compared to the corresponding GH not linked to the XTEN of and administered at a comparable dose to a subject. In other cases, administration of a therapeutically effective dose of a fusion protein of an embodiment of formulas I-VIII to a subject in need thereof can result in a gain in time between consecutive doses necessary to maintain a therapeutically effective dose regimen of at least 48 h, or at least 72 h, or at least about 96 h, or at least about 120 h, or at least about 7 days, or at least about 14 days, or at least about 21 days between consecutive doses compared to a GH not linked to XTEN and administered at a comparable dose.

[0037] The fusion proteins can be designed to have different configurations, N- to C-terminus, of a GH, XTEN, and optional spacer sequences, including but not limited to XTEN-GH, GH-XTEN, XTEN-S-GH, GH-S-XTEN, XTEN-GH-XTEN, GH-GH-XTEN, XTEN-GH-GH, GH-S-GH-XTEN, XTEN-GH-S-GH, and multimers thereof. The choice of configuration can, as disclosed herein, confer particular pharmacokinetic, physico/chemical, or pharmacologic properties.

[0038] In some embodiments, the isolated fusion protein is characterized in that: (i) it has a longer half-life compared to the corresponding growth hormone that lacks the XTEN; (ii) when a smaller molar amount of the fusion protein is administered to a subject in comparison to the corresponding growth hormone that lacks the XTEN administered to a subject under an otherwise equivalent dose regimen, the fusion protein achieves a comparable area under the curve (AUC) as the corresponding growth hormone that lacks the XTEN; (iii) when a smaller molar amount of the fusion protein is administered to a subject in comparison to the corresponding growth hormone that lacks the XTEN administered to a subject under an otherwise equivalent dose regimen, the fusion protein achieves a comparable therapeutic effect as the corresponding growth hormone that lacks the XTEN; (iv) when the fusion protein is administered to a subject less frequently in comparison to the corresponding growth hormone that lacks the XTEN administered to a subject using an otherwise equivalent molar amount, the fusion protein achieves a comparable area under the curve (AUC) as the corresponding growth hormone that lacks the XTEN; (v) when the fusion protein is administered to a subject less frequently in comparison to the corresponding growth hormone that lacks the XTEN administered to a subject using an otherwise equivalent molar amount, the fusion protein achieves a comparable therapeutic effect as the corresponding growth hormone that lacks the XTEN; (vi) when an accumulatively smaller molar amount of the fusion protein is administered to a subject in comparison to the corresponding growth hormone that lacks the XTEN administered to a subject under an otherwise equivalent dose period, the fusion protein achieves comparable area under the curve (AUC) as the corresponding growth hormone that lacks the XTEN; or (vii) when an accumulatively smaller molar amount of the fusion protein is administered to a subject in comparison to the corresponding growth hormone that lacks the XTEN administered to a subject under an otherwise equivalent dose period, the fusion protein achieves comparable therapeutic effect as the corresponding growth hormone that lacks the XTEN.

[0039] In one embodiment, the GHXTEN fusion proteins of formulas I-VIII described above exhibit a biological activity of at least about 0.1%, or at least about 0.1%, or at least about 1%, or at least about 2%, or at least about 3%, or at least about 4%, or at least about 5%, or at least about 10%, or at least about 20%, or at least about 30%, or at least 40%, or at least about 50%, or at least about 60%, or at least about 70%, or at least about 80%, or at least about 90%, or at least about 95% of the biological activity compared to the GH not linked to the fusion protein. In another embodiment, the GHXTEN fusion proteins of formulas I-VIII bind the same receptors or ligands as the corresponding parental biologically active protein that is not covalently linked to the fusion protein.

[0040] The invention provides a method of producing a fusion protein comprising a growth hormone fused to one or more extended recombinant polypeptides (XTEN), comprising: (a) providing host cell comprising a recombinant polynucleotide molecule encoding the fusion protein (b) culturing the host cell under conditions permitting the expression of the fusion protein; and (c) recovering the fusion protein. In one embodiment of the method, the growth hormone of the fusion protein has at least 90% sequence identity to human growth hormone or a sequence selected from Table 1. In another embodiment of the method, the one or more XTEN of the expressed fusion protein has at least about 90%, or about 91%, or about 92%, or about 93%, or about 94%, or about 95%, or about 96%, or about 97%, or about 98%, or about 99% to about 100% sequence identity to a sequence selected from Table 3. In another embodiment of the method, the polynucleotide encoding the XTEN is codon optimized for enhanced expression of said fusion protein in the host cell. In another embodiment of the method, the host cell is a prokaryotic cell. In another embodiment of the method, the host cell is E. coli. In another embodiment of the method the isolated fusion protein is recovered from the host cell cytoplasm in substantially soluble form.

[0041] The invention provides isolated nucleic acids comprising a polynucleotide sequence selected from (a) a polynucleotide encoding the fusion protein of any of the foregoing embodiments, or (b) the complement of the polynucleotide of (a). In one embodiment, the invention provides an isolated nucleic acid comprising a polynucleotide sequence that has at least 80% sequence identity, or about 85%, or at least about 90%, or about 91%, or about 92%, or about 93%, or about 94%, or about 95%, or about 96%, or about 97%, or about 98%, or about 99% to about 100% sequence identity to (a) a polynucleotide sequence of comparable length selected from Table 35, Table 36, and Table 37; or (b) the complement of the polynucleotide of (a). The invention provides expression vectors comprising the nucleic acid of any of the embodiments hereinabove described in this paragraph. In one embodiment, the expression vector of the foregoing further comprises a recombinant regulatory sequence operably linked to the polynucleotide sequence. In another embodiment, the polynucleotide sequence of the expression vectors of the foregoing is fused in frame to a polynucleotide encoding a secretion signal sequence, which can be a prokaryotic signal sequence. In one embodiment, the secretion signal sequence is selected from OmpA, DsbA, and PhoA signal sequences.

[0042] The invention provides a host cell, which can comprise an expression vector disclosed in the foregoing paragraph. In one embodiment, the host cell is a prokaryotic cell. In another embodiment, the host cell is E. coli. In another embodiment, the host cell is a eukaryotic cell.

[0043] In one embodiment, the invention provides pharmaceutical compositions comprising the fusion protein of any of the foregoing embodiments and a pharmaceutically acceptable carrier. In another embodiment, the invention provides kits, comprising packaging material and at least a first container comprising the pharmaceutical composition of the foregoing embodiment and a label identifying the pharmaceutical composition and storage and handling conditions, and a sheet of instructions for the reconstitution and/or administration of the pharmaceutical compositions to a subject.

[0044] The invention provides a method of treating a growth-hormone related condition in a subject, comprising administering to the subject a therapeutically effective amount of the fusion protein of any of the foregoing embodiments. In one embodiment of the method, the growth-hormone related condition is selected from growth-hormone deficiency, Turner's Syndrome, Prader-Willi Syndrome, idiopathic short stature, AIDS wasting, multiple sclerosis, Crohn's disease, ulcerative colitis, and muscular dystrophy.

[0045] In some embodiments, the composition can be administered subcutaneously, intramuscularly, or intravenously. In one embodiment, the composition is administered at a therapeutically effective amount. In one embodiment, the therapeutically effective amount results in a gain in time spent within a therapeutic window for the fusion protein compared to the corresponding GH of the fusion protein not linked to the fusion protein and administered at a comparable dose to a subject. The gain in time spent within the therapeutic window can at least three-fold longer than the corresponding GH not linked to the fusion protein, or alternatively, at least four-fold, or five-fold, or six-fold, or seven-fold, or eight-fold, or nine-fold, or at least 10-fold, or at least 20-fold, or at least about 30-fold, or at least about 50-fold, or at least about 100-fold longer than the corresponding GH not linked to the fusion protein. In some embodiments of the method of treatment, (i) a smaller molar amount of (e.g. of about two-fold less, or about three-fold less, or about four-fold less, or about five-fold less, or about six-fold less, or about eight-fold less, or about 100 fold-less or greater) the fusion protein is administered in comparison to the corresponding growth hormone that lacks the XTEN under an otherwise same dose regimen, and the fusion protein achieves a comparable area under the curve and/or a comparable therapeutic effect as the corresponding growth hormone that lacks the XTEN; (ii) the fusion protein is administered less frequently (e.g., every two days, about every seven days, about every 14 days, about every 21 days, or about, monthly) in comparison to the corresponding growth hormone that lacks the XTEN under an otherwise same dose amount, and the fusion protein achieves a comparable area under the curve and/or a comparable therapeutic effect as the corresponding growth hormone that lacks the XTEN; or (iii) an accumulative smaller molar amount (e.g. about 5%, or about 10%, or about 20%, or about 40%, or about 50%, or about 60%, or about 70%, or about 80%, or about 90% less) of the fusion protein is administered in comparison to the corresponding growth hormone that lacks the XTEN under the otherwise same dose regimen the fusion protein achieves a comparable area under the curve and/or a comparable therapeutic effect as the corresponding growth hormone that lacks the XTEN. The accumulative smaller molar amount is measure for a period of at least about one week, or about 14 days, or about 21 days, or about one month. In some embodiments of the method, the therapeutic effect is a measured parameter selected from IGF-1 concentrations, IGFBP3 concentration, height velocity, lean body mass, total body fat, trunk fat, response to insulin challenge, rate of division of chondrocytes, chondrocyte numbers, bone density, bone growth, and increase in epiphyseal plate width.

[0046] In another embodiment, invention provides a method of treating a disease, disorder or condition, comprising administering the pharmaceutical composition described above to a subject using multiple consecutive doses of the pharmaceutical composition administered using a therapeutically effective dose regimen. In one embodiment of the foregoing, the therapeutically effective dose regimen can result in a gain in time of at least three-fold, or alternatively, at least four-fold, or five-fold, or six-fold, or seven-fold, or eight-fold, or nine-fold, or at least 10-fold, or at least 20-fold, or at least about 30-fold, or at least about 50-fold, or at least about 100-fold longer time between at least two consecutive Cₘₐₓ peaks and/or Cₘᵢₙ troughs for blood levels of the fusion protein compared to the corresponding GH of the fusion protein not linked to the fusion protein and administered at a comparable dose regimen to a subject. In another embodiment of the foregoing, the administration of the fusion protein results in improvement in at least one measured parameter of a growth hormone-related disease using less frequent dosing or a lower total dosage in moles of the fusion protein of the pharmaceutical composition compared to the corresponding biologically active protein component(s) not linked to the fusion protein and administered to a subject d using a therapeutically effective regimen to a subject.

[0047] The invention further provides use of the compositions comprising the fusion protein of any of the foregoing embodiments in the preparation of a medicament for treating a disease, disorder or condition in a subject in need thereof. In one embodiment of the foregoing, the disease, disorder or condition is selected from group consisting of Turner's Syndrome, Prader-Willi Syndrome, idiopathic short stature, AIDS wasting, multiple sclerosis, Crohn's disease, ulcerative colitis, and muscular dystrophy. Any of the disclosed embodiments can be practiced alone or in combination depending on the interested application.

### INCORPORATION BY REFERENCE

[0048] All publications, patents, and patent applications mentioned in this specification are herein incorporated by reference to the same extent as if each individual publication, patent, or patent application was specifically and individually indicated to be incorporated by reference.

### BRIEF DESCRIPTION OF THE DRAWINGS

[0049] The features and advantages of the invention may be further explained by reference to the following detailed description and accompanying drawings that sets forth illustrative embodiments.

[0050] FIG. 1 shows schematic representations of exemplary GHXTEN fusion proteins (FIGS. 1A-H), all depicted in an N- to C-terminus orientation. FIG. 1A shows two different configurations of GHXTEN fusion proteins (100), each comprising a single growth hormone (GH) and an XTEN, the first of which has an XTEN molecule (102) attached to the C-terminus of a GH (103), and the second of which has an XTEN molecule attached to the N-terminus of a GH (103). FIG. 1B shows two different configurations of GHXTEN fusion proteins (100), each comprising a single GH, a spacer sequence and an XTEN, the first of which has an XTEN molecule (102) attached to the C-terminus of a spacer sequence (104) and the spacer sequence attached to the C-terminus of a GH (103) and the second of which has an XTEN molecule attached to the N-terminus of a spacer sequence (104) and the spacer sequence attached to the N-terminus of a GH (103). FIG. 1C shows two different configurations of GHXTEN fusion proteins (101), each comprising two molecules of a single GH and one molecule of an XTEN, the first of which has an XTEN linked to the C-terminus of a first GH and that GH is linked to the C-terminus of a second GH, and the second of which is in the opposite orientation in which the XTEN is linked to the N-terminus of a first GH and that GH is linked to the N-terminus of a second GH. FIG. 1D shows two different configurations of GHXTEN fusion proteins (101), each comprising two molecules of a single GH, a spacer sequence and one molecule of an XTEN, the first of which has an XTEN linked to the C-terminus of a spacer sequence and the spacer sequence linked to the C-terminus of a first GH which is linked to the C-terminus of a second GH, and the second of which is in the opposite orientation in which the XTEN is linked to the N-terminus of a spacer sequence and the spacer sequence is linked to the N-terminus of a first GH that that GH is linked to the N-terminus of a second GH. FIG. 1E shows two different configurations of GHXTEN fusion proteins (101), each comprising two molecules of a single GH, a spacer sequence and one molecule of an XTEN, the first of which has an XTEN linked to the C-terminus of a first GH and the first GH linked to the C-terminus of a spacer sequence which is linked to the C-terminus of a second GH molecule, and the second of which is in the opposite configuration of XTEN linked to the N-terminus of a first GH which is linked to the N-terminus of a spacer sequence which in turn is linked to the N-terminus of a second molecule of GH. FIG. 1F shows a configuration of GHXTEN fusion protein (105), each comprising one molecule of GH and two molecules of an XTEN linked to the N-terminus and the C-terminus of the GH. FIG. 1G shows a configuration (106) of a single GH linked to two XTEN, with the second XTEN separated from the GH by a spacer sequence. FIG. 1H s a configuration (106) of a two GH linked to two XTEN, with the second XTEN linked to the C-terminus of the first GH nad the N-terminus of the second GH, which is at the C-terminus of the GHXTEN.

[0051] FIG. 2 is a schematic illustration of exemplary polynucleotide constructs (FIGS. 2A-H) of GHXTEN genes that encode the corresponding GHXTEN polypeptides of FIG. 1; all depicted in a 5′ to 3′ orientation. In these illustrative examples the genes encode GHXTEN fusion proteins with one GH and XTEN (200); or one GH, one spacer sequence and one XTEN (200); two GH and one XTEN (201); or two GH, a spacer sequence and one XTEN (201); one GH and two XTEN (205); or two GH and two XTEN (206). In these depictions, the polynucleotides encode the following components: XTEN (202), GH (203), and spacer amino acids that can include a cleavage sequence (204), with all sequences linked in frame.

[0052] FIG. 3 is a schematic illustration of two exemplary monomeric GHXTEN and the ability of the monomeric fusion proteins to bind to a target receptor on a cell surface, with subsequent cell signaling. FIG. 3A shows a GHXTEN fusion protein (100) consisting of a GH (103) and an XTEN (102) and a second GHXTEN fusion protein (105) consisting of a GH linked to two XTEN (105). FIG. 3B shows the interaction of the GHXTEN with the GH on the C-terminus (100) and the GHXTEN with an XTEN on the C-terminus (105) with target receptors (108) to GH on a cell surface (107). In this case, binding to the receptor with high affinity is exhibited when GH has a free C-terminus, while the GHXTEN with a C-terminal XTEN does not bind tightly to the receptor, and disassociates, as seen in FIG. 3C. FIG. 3D shows that the bound GHXTEN (100) with high binding affinity remains bound to the receptor (106) and has been internalized into an endosome (110) within the cell, illustrating receptor-mediated clearance of the bound GH and triggering cell signaling (109), portrayed as stippled cytoplasm.

[0053] FIG. 4 is a schematic flowchart of representative steps in the assembly, production and the evaluation of a XTEN.

[0054] FIG. 5 is a schematic flowchart of representative steps in the assembly of a GHXTEN polynucleotide construct encoding a fusion protein. Individual oligonucleotides 501 are annealed into sequence motifs 502 such as a 12 amino acid motif (“12-mer”), which is subsequently ligated with an oligo containing BbsI, and KpnI restriction sites 503. Additional sequence motifs from a library are annealed to the 12-mer until the desired length of the XTEN gene 504 is achieved. The XTEN gene is cloned into a stuffer vector. The vector encodes a Flag sequence 506 followed by a stopper sequence that is flanked by BsaI, BbsI, and KpnI sites 507 and an exendin-4 gene 508, resulting in the gene 500 encoding an XTEN-GH fusion protein.

[0055] FIG. 6 is a schematic flowchart of representative steps in the assembly of a gene encoding fusion protein comprising a growth homroe (GH) and XTEN, its expression and recovery as a fusion protein, and its evaluation as a candidate GHXTEN product.

[0056] FIG. 7 is a schematic representation of the design of GHXTEN expression vectors with different processing strategies. FIG. 7A shows an exemplary expression vector encoding XTEN fused to the 3′ end of the sequence encoding GH. Note that no additional leader sequences are required in this vector. FIG. 7B depicts an expression vector encoding XTEN fused to the 5′ end of the sequence encoding GH with a CBD leader sequence and a TEV protease site. FIG. 7C depicts an expression vector as in FIG. 7B where the CBD and TEV processing site have been replaced with an optimized N-terminal leader sequence (NTS). FIG. 7D depicts an expression vector encoding an NTS sequence, an XTEN, a sequence encoding GH, and than a second sequence encoding an XTEN.

[0057] FIG. 8 is a schematic representation of the step-wise construction of GHXTEN genes that contain N-terminal XTEN encoding sequences linked to hGH and the subsequent linkage of sequences encoding either 144 or 288 XTEN linked to the C-terminus of XTEN, as described in Example 22.

[0058] FIG. 9 shows results of expression assays for the indicated constructs comprising GFP and XTEN sequences. The expression cultures were assayed using a fluorescence plate reader (excitation 395 nm, emission 510 nm) to determine the amount of GFP reporter present. The results, graphed as box and whisker plots, indicate that while median expression levels were approximately half of the expression levels compared to the “benchmark” CBD N-terminal helper domain, the best clones from the libraries were much closer to the benchmarks, indicating that further optimization around those sequences was warranted. The results also show that the libraries starting with amino acids MA had better expression levels than those beginning with ME (see Example 14).

[0059] FIG. 10 shows three randomized libraries used for the third and fourth codons in the N-terminal sequences of clones from LCW546, LCW547 and LCW552. The libraries were designed with the third and fourth residues modified such that all combinations of allowable XTEN codons were present at these positions, as shown. In order to include all the allowable XTEN codons for each library, nine pairs of oligonucleotides encoding 12 amino acids with codon diversities of third and fourth residues were designed, annealed and ligated into the NdeI/BsaI restriction enzyme digested stuffer vector pCW0551 (Stuffer-XTEN_AM875-GFP), and transformed into E. coli BL21Gold(DE3) competent cells to obtain colonies of the three libraries LCW0569 (SEQ ID NOS 845-846, respectively, in order of appearance), LCW0570 (SEQ ID NOS 847-848, respectively, in order of appearance), and LCW0571 (SEQ ID NOS 849-850, respectively, in order of appearance).

[0060] FIG. 11 shows a histogram of a retest of the top 75 clones after the optimization step, as described in Example 15, for GFP fluorescence signal, relative to the benchmark CBD_AM875 construct. The results indicated that several clones were now superior to the benchmark clones.

[0061] FIG. 12 is a schematic of a combinatorial approach undertaken for the union of codon optimization preferences for two regions of the N-terminus 48 amino acids. The approach created novel 48mers at the N-terminus of the XTEN protein for evaluation of the optimization of expression that resulted in leader sequences that may be a solution for expression of XTEN proteins where the XTEN is N-terminal to the GH.

[0062] FIG. 13 shows an SDS-PAGE gel confirming expression of preferred clones obtained from the XTEN N-terminal codon optimization experiments, in comparison to benchmark XTEN clones comprising CBD leader sequences at the N-terminus of the construct sequences, as described in Example 17.

[0063] FIG. 14 shows an SDS-PAGE gel of samples from a stability study of the fusion protein of XTEN_AE864 fused to the N-terminus of GFP (see Example 39). The GFP-XTEN was incubated in cynomolgus plasma and rat kidney lysate for up to 7 days at 37° C. In addition, GFP-XTEN administered to cynomolgus monkeys was also assessed. Samples were withdrawn at 0, 1 and 7 days and analyzed by SDS PAGE followed by detection using Western analysis and detection with antibodies against GFP.

[0064] FIG. 15 shows the results of a receptor binding assay for hGH in which the binding activity of hGH fused to K288 polypeptide is compared to free hGH, as described in Example 25.

[0065] FIG. 16 shows the results of in vitro binding affinity assay of hGH-AM864 (circles) and AM864-hGH (inverted triangles) to hGHR-Fc, as described in Example 25. Unmodified recombinant hGH (squares) is shown for comparison.

[0066] FIG. 17 shows the effects of heat treatment on stability of hGH and AM864-hGH, as described in Example 26. FIG. 17A is an SDS-PAGE gel of the two preparations treated at 25° C. and 80° C. for 15 minutes, while FIG. 17B shows the corresponding percentage of receptor binding activity of the 80° C. sample relative to the 25° C. treatment, indicating that the XTEN conferred heat stability and retention of activity to the hGH and the GHXTEN fusion protein.

[0067] FIG. 18 shows results of an ELISA-based assay to determine the ability of addition of a C-terminus XTEN to reduce binding affinity of GHXTEN to bind to GH receptor, as described in Example 25.

[0068] FIG. 19 shows SDS-PAGE analysis of hGH fused to K288, with samples from throughout the purification process, as described in Example 19.

[0069] FIG. 20 shows SDS-PAGE analysis of 5 μg of final purified protein of hGH fused to Y576 in the configurations of hGH-Y576 and Y576-hGH subjected to both non-reducing and reducing SDS-PAGE, as described in Example 24, using NuPAGE 4-12% Bis-Tris gel from Invitrogen according to manufacturer's specifications.

[0070] FIG. 21 shows size exclusion chromatography profiles of two GHXTEN constructs Y576-GH and hGH-Y576 (N- to C-terminus), shown as an overlay, as described in Example 24.

[0071] FIG. 22 shows the pharmacokinetic profile of two GHXTEN constructs Y576-GH and hGH-Y576 (N- to C-terminus) following intravenous administration to cynomolgus monkeys, as described in Example 30. The results show that the orientation (N- versus C-terminal) of hGH relative to the XTEN did not affect the clearance of the fusion proteins.

[0072] FIG. 23 shows the pharmacokinetic profile after a single dose of 5 mg/kg AM864-hGH administered subcutaneously to cynomolgus monkeys, with the derived equivalent hGH concentration shown (dashed line), as described in Example 30. Terminal half-life was calculated as 33 hours by WinNonLin using a single compartment fit.

[0073] FIG. 24 shows the results of IGF-1 secretion in cynomolgus monkeys in response to administration of hGH or the GHXTEN AM864-hGH at the doses indicated, as described in Example 27.

[0074] FIG. 25 shows the effects of administration of hGH or AM864-hGH at the indicated doses on body weight in a hypox rat model, as described in Example 28. The results show retention of biologic activity by the GHXTEN constructs that is equivalent in potency to hGH, yet with less frequent dosing.

[0075] FIG. 26 shows the comparative effects of administration of placebo, hGH, and AM864-hGH on growth of cartilage in the tibial epiphyseal plate in hypox rats, shown in histologic cross-sections of the tibia after 9 days of treatment, as described in Example 29.

[0076] FIG. 27 shows the pharmacokinetic results of four hGH GHTXEN fusion proteins administered to rats by the subcutaneous route, compared to unmodified recombinant hGH, as described in Example 31.

[0077] FIG. 28 shows the concentration profiles of three hGH XTEN constructs after subcutaneous administration to cynomolgus monkeys, as described in Example 32.

[0078] FIG. 29 shows the results of a pharmacokinetic study of three doses levels of the GHXTEN AE912-hGH-AE144 administered to male and female cynos SC at 0.3 (open circles), 1.5 (squares), and 7.5 mg/kg (triangles), as described in Example 33.

[0079] FIG. 30. Shows the results of IGF-1 levels in cynos in response to the administration of AE912-hGH-AE144, as described in Example 33 (same groups as per FIG. 29).

[0080] FIG. 31 shows the results of an experiment to compare bioavailability of the GHXTEN AE912-hGH-AE144 administered by three different routes, as described in Example 34. AE912-hGH-AE144 was administered to male and female cynos SC at 1.5 mg/kg via intravenous (trangle), subcutaneous (open circles), and intramuscular (squares) routes, with plasma concentrations of the GHXTEN shown in the figure.

[0081] FIG. 32 shows the effects of administration of vehicle (open circles), recombinant hGH dosed at 5 nmol/kg/day (closed circles), the GHXTEN AE912-hGH-AE144 at varying doses and dose frequency (closed triangles=0.5 nmol/kg/day; open triangles=1.5 nmol/day; squares=3 nmol/kg/Q2D) on body weight in hypox rats, as described in Example 35.

[0082] FIG. 33 shows results of a modeled projection of the ability of hGH or the GHXTEN to maintain blood levels within a therapeutic window in the hypox rat model, based on results derived from the data portrayed in FIG. 32, using the same dosing groups.

[0083] FIG. 34 shows results of a of a size exclusion chromatography analysis of glucagon-XTEN construct samples measured against protein standards of known molecular weight, with the graph output as absorbance versus retention volume, as described in Example 37. The glucagon-XTEN constructs are 1) glucagon-Y288; 2) glucagonY-144; 3) glucagon-Y72; and 4) glucagon-Y36. The results indicate an increase in apparent molecular weight with increasing length of XTEN moiety.

[0084] FIG. 35 shows the pharmacokinetic profile (plasma concentrations) in cynomolgus monkeys after single doses of different compositions of GFP linked to unstructured polypeptides of varying length, administered either subcutaneously or intravenously, as described in Example 38. The compositions were GFP-L288, GFP-L576, GFP-XTEN_AF576, GFP-Y576 and XTEN_AD836-GFP. Blood samples were analyzed at various times after injection and the concentration of GFP in plasma was measured by ELISA using a polyclonal antibody against GFP for capture and a biotinylated preparation of the same polyclonal antibody for detection. Results are presented as the plasma concentration versus time (h) after dosing and show, in particular, a considerable increase in half-life for the XTEN_AD836-GFP, the composition with the longest sequence length of XTEN. The construct with the shortest sequence length, the GFP-L288 had the shortest half-life.

[0085] FIG. 36 illustrates allometric scaling results for predicted human response to Ex4-XTEN_AE864 based on measured results from four animal species; i.e., mice, rats, cynomolgus monkeys and dogs. FIG. 36A shows measured terminal half-life versus body mass, with a predicted T½ in humans of 139 h. FIG. 36B shows measured drug clearance versus body mass, with a predicted clearance rate value of 30 ml/h in humans. FIG. 36C shows measured volume of distribution versus body mass, with a predicted value of 5970 ml in humans.

[0086] FIG. 37 shows the near UV circular dichroism spectrum of Ex4-XTEN_AE864, performed as described in Example 42.

### DETAILED DESCRIPTION OF THE INVENTION

[0087] Before the embodiments of the invention are described, it is to be understood that such embodiments are provided by way of example only, and that various alternatives to the embodiments of the invention described herein may be employed in practicing the invention. Numerous variations, changes, and substitutions will now occur to those skilled in the art without departing from the invention.

[0088] Unless otherwise defined, all technical and scientific terms used herein have the same meaning as commonly understood by one of ordinary skill in the art to which this invention belongs. Although methods and materials similar or equivalent to those described herein can be used in the practice or testing of the present invention, suitable methods and materials are described below. In case of conflict, the patent specification, including definitions, will control. In addition, the materials, methods, and examples are illustrative only and not intended to be limiting. Numerous variations, changes, and substitutions will now occur to those skilled in the art without departing from the invention.

### Definitions

[0089] As used herein, the following terms have the meanings ascribed to them unless specified otherwise.

[0090] As used in the specification and claims, the singular forms “a”, “an” and “the” include plural references unless the context clearly dictates otherwise. For example, the term “a cell” includes a plurality of cells, including mixtures thereof.

[0091] The terms “polypeptide”, “peptide”, and “protein” are used interchangeably herein to refer to polymers of amino acids of any length. The polymer may be linear or branched, it may comprise modified amino acids, and it may be interrupted by non-amino acids. The terms also encompass an amino acid polymer that has been modified, for example, by disulfide bond formation, glycosylation, lipidation, acetylation, phosphorylation, or any other manipulation, such as conjugation with a labeling component.

[0092] As used herein the term “amino acid” refers to either natural and/or unnatural or synthetic amino acids, including but not limited to glycine and both the D or L optical isomers, and amino acid analogs and peptidomimetics. Standard single or three letter codes are used to designate amino acids.

[0093] The term “natural L-amino acid” means the L optical isomer forms of glycine (G), proline (P), alanine (A), valine (V), leucine (L), isoleucine (I), methionine (M), cysteine (C), phenylalanine (F), tyrosine (Y), tryptophan (W), histidine (H), lysine (K), arginine (R), glutamine (Q), asparagine (N), glutamic acid (E), aspartic acid (D), serine (S), and threonine (T).

[0094] The term “non-naturally occurring,” as applied to sequences and as used herein, means polypeptide or polynucleotide sequences that do not have a counterpart to, are not complementary to, or do not have a high degree of homology with a wild-type or naturally-occurring sequence found in a mammal. For example, a non-naturally occurring polypeptide or fragment may share no more than 99%, 98%, 95%, 90%, 80%, 70%, 60%, 50% or even less amino acid sequence identity as compared to a natural sequence when suitably aligned.

[0095] The terms “hydrophilic” and “hydrophobic” refer to the degree of affinity that a substance has with water. A hydrophilic substance has a strong affinity for water, tending to dissolve in, mix with, or be wetted by water, while a hydrophobic substance substantially lacks affinity for water, tending to repel and not absorb water and tending not to dissolve in or mix with or be wetted by water Amino acids can be characterized based on their hydrophobicity. A number of scales have been developed. An example is a scale developed by Levitt, M, et al., J Mol Biol (1976) 104:59, which is listed in Hopp, T P, et al., Proc Natl Acad Sci USA (1981) 78:3824. Examples of “hydrophilic amino acids” are arginine, lysine, threonine, alanine, asparagine, and glutamine. Of particular interest are the hydrophilic amino acids aspartate, glutamate, and serine, and glycine. Examples of “hydrophobic amino acids” are tryptophan, tyrosine, phenylalanine, methionine, leucine, isoleucine, and valine.

[0096] A “fragment” is a truncated form of a native biologically active protein that retains at least a portion of the therapeutic and/or biological activity. A “variant” is a protein with sequence homology to the native biologically active protein that retains at least a portion of the therapeutic and/or biological activity of the biologically active protein. For example, a variant protein may share at least 70%, 75%, 80%, 85%, 90%, 95%, 96%, 97%, 98% or 99% amino acid sequence identity with the reference biologically active protein. As used herein, the term “biologically active protein moiety” includes proteins modified deliberately, as for example, by site directed mutagenesis, insertions, or accidentally through mutations.

[0097] A “host cell” includes an individual cell or cell culture which can be or has been a recipient for the subject vectors. Host cells include progeny of a single host cell. The progeny may not necessarily be completely identical (in morphology or in genomic of total DNA complement) to the original parent cell due to natural, accidental, or deliberate mutation. A host cell includes cells transfected in vivo with a vector of this invention.

[0098] “Isolated,” when used to describe the various polypeptides disclosed herein, means polypeptide that has been identified and separated and/or recovered from a component of its natural environment. Contaminant components of its natural environment are materials that would typically interfere with diagnostic or therapeutic uses for the polypeptide, and may include enzymes, hormones, and other proteinaceous or non-proteinaceous solutes. As is apparent to those of skill in the art, a non-naturally occurring polynucleotide, peptide, polypeptide, protein, antibody, or fragments thereof, does not require “isolation” to distinguish it from its naturally occurring counterpart. In addition, a “concentrated”, “separated” or “diluted” polynucleotide, peptide, polypeptide, protein, antibody, or fragments thereof, is distinguishable from its naturally occurring counterpart in that the concentration or number of molecules per volume is generally greater than that of its naturally occurring counterpart. In general, a polypeptide made by recombinant means and expressed in a host cell is considered to be “isolated.”

[0099] An “isolated” polynucleotide or polypeptide-encoding nucleic acid or other polypeptide-encoding nucleic acid is a nucleic acid molecule that is identified and separated from at least one contaminant nucleic acid molecule with which it is ordinarily associated in the natural source of the polypeptide-encoding nucleic acid. An isolated polypeptide-encoding nucleic acid molecule is other than in the form or setting in which it is found in nature. Isolated polypeptide-encoding nucleic acid molecules therefore are distinguished from the specific polypeptide-encoding nucleic acid molecule as it exists in natural cells. However, an isolated polypeptide-encoding nucleic acid molecule includes polypeptide-encoding nucleic acid molecules contained in cells that ordinarily express the polypeptide where, for example, the nucleic acid molecule is in a chromosomal or extra-chromosomal location different from that of natural cells.

[0100] A “chimeric” protein contains at least one fusion polypeptide comprising regions in a different position in the sequence than that which occurs in nature. The regions may normally exist in separate proteins and are brought together in the fusion polypeptide; or they may normally exist in the same protein but are placed in a new arrangement in the fusion polypeptide. A chimeric protein may be created, for example, by chemical synthesis, or by creating and translating a polynucleotide in which the peptide regions are encoded in the desired relationship.

[0101] “Conjugated”, “linked,” “fused,” and “fusion” are used interchangeably herein. These terms refer to the joining together of two or more chemical elements or components, by whatever means including chemical conjugation or recombinant means. For example, a promoter or enhancer is operably linked to a coding sequence if it affects the transcription of the sequence. Generally, “operably linked” means that the DNA sequences being linked are contiguous, and in reading phase or in-frame. An “in-frame fusion” refers to the joining of two or more open reading frames (ORFs) to form a continuous longer ORF, in a manner that maintains the correct reading frame of the original ORFs. Thus, the resulting recombinant fusion protein is a single protein containing two or more segments that correspond to polypeptides encoded by the original ORFs (which segments are not normally so joined in nature).

[0102] In the context of polypeptides, a “linear sequence” or a “sequence” is an order of amino acids in a polypeptide in an amino to carboxyl terminus direction in which residues that neighbor each other in the sequence are contiguous in the primary structure of the polypeptide. A “partial sequence” is a linear sequence of part of a polypeptide that is known to comprise additional residues in one or both directions.

[0103] “Heterologous” means derived from a genotypically distinct entity from the rest of the entity to which it is being compared. For example, a glycine rich sequence removed from its native coding sequence and operatively linked to a coding sequence other than the native sequence is a heterologous glycine rich sequence. The term “heterologous” as applied to a polynucleotide, a polypeptide, means that the polynucleotide or polypeptide is derived from a genotypically distinct entity from that of the rest of the entity to which it is being compared.

[0104] The terms “polynucleotides”, “nucleic acids”, “nucleotides” and “oligonucleotides” are used interchangeably. They refer to a polymeric form of nucleotides of any length, either deoxyribonucleotides or ribonucleotides, or analogs thereof. Polynucleotides may have any three-dimensional structure, and may perform any function, known or unknown. The following are non-limiting examples of polynucleotides: coding or non-coding regions of a gene or gene fragment, loci (locus) defined from linkage analysis, exons, introns, messenger RNA (mRNA), transfer RNA, ribosomal RNA, ribozymes, cDNA, recombinant polynucleotides, branched polynucleotides, plasmids, vectors, isolated DNA of any sequence, isolated RNA of any sequence, nucleic acid probes, and primers. A polynucleotide may comprise modified nucleotides, such as methylated nucleotides and nucleotide analogs. If present, modifications to the nucleotide structure may be imparted before or after assembly of the polymer. The sequence of nucleotides may be interrupted by non-nucleotide components. A polynucleotide may be further modified after polymerization, such as by conjugation with a labeling component.

[0105] The term “complement of a polynucleotide” denotes a polynucleotide molecule having a complementary base sequence and reverse orientation as compared to a reference sequence, such that it could hybridize with a reference sequence with complete fidelity.

[0106] “Recombinant” as applied to a polynucleotide means that the polynucleotide is the product of various combinations of in vitro cloning, restriction and/or ligation steps, and other procedures that result in a construct that can potentially be expressed in a host cell.

[0107] The terms “gene” or “gene fragment” are used interchangeably herein. They refer to a polynucleotide containing at least one open reading frame that is capable of encoding a particular protein after being transcribed and translated. A gene or gene fragment may be genomic or cDNA, as long as the polynucleotide contains at least one open reading frame, which may cover the entire coding region or a segment thereof. A “fusion gene” is a gene composed of at least two heterologous polynucleotides that are linked together.

[0108] “Homology” or “homologous” refers to sequence similarity or interchangeability between two or more polynucleotide sequences or two or more polypeptide sequences. When using a program such as BestFit to determine sequence identity, similarity or homology between two different amino acid sequences, the default settings may be used, or an appropriate scoring matrix, such as blosum45 or blosum80, may be selected to optimize identity, similarity or homology scores. Preferably, polynucleotides that are homologous are those which hybridize under stringent conditions as defined herein and have at least 70%, preferably at least 80%, more preferably at least 90%, more preferably 95%, more preferably 97%, more preferably 98%, and even more preferably 99% sequence identity to those sequences.

[0109] “Ligation” refers to the process of forming phosphodiester bonds between two nucleic acid fragments or genes, linking them together. To ligate the DNA fragments or genes together, the ends of the DNA must be compatible with each other. In some cases, the ends will be directly compatible after endonuclease digestion. However, it may be necessary to first convert the staggered ends commonly produced after endonuclease digestion to blunt ends to make them compatible for ligation.

[0110] The terms “stringent conditions” or “stringent hybridization conditions” includes reference to conditions under which a polynucleotide will hybridize to its target sequence, to a detectably greater degree than other sequences (e.g., at least 2-fold over background). Generally, stringency of hybridization is expressed, in part, with reference to the temperature and salt concentration under which the wash step is carried out. Typically, stringent conditions will be those in which the salt concentration is less than about 1.5 M Na ion, typically about 0.01 to 1.0 M Na ion concentration (or other salts) at pH 7.0 to 8.3 and the temperature is at least about 30° C. for short polynucleotides (e.g., 10 to 50 nucleotides) and at least about 60° C. for long polynucleotides (e.g., greater than 50 nucleotides)—for example, “stringent conditions” can include hybridization in 50% formamide, 1 M NaCl, 1% SDS at 37° C., and three washes for 15 min each in 0.1×SSC/1% SDS at 60° C. to 65° C. Alternatively, temperatures of about 65° C., 60° C., 55° C., or 42° C. may be used. SSC concentration may be varied from about 0.1 to 2×SSC, with SDS being present at about 0.1%. Such wash temperatures are typically selected to be about 5° C. to 20° C. lower than the thermal melting point for the specific sequence at a defined ionic strength and pH. The Tm is the temperature (under defined ionic strength and pH) at which 50% of the target sequence hybridizes to a perfectly matched probe. An equation for calculating Tm and conditions for nucleic acid hybridization are well known and can be found in Sambrook, J. et al. (1989) Molecular Cloning: A Laboratory Manual, 2^{nd} ed., vol. 1-3, Cold Spring Harbor Press, Plainview N.Y.; specifically see volume 2 and chapter 9. Typically, blocking reagents are used to block non-specific hybridization. Such blocking reagents include, for instance, sheared and denatured salmon sperm DNA at about 100-200 μg/ml. Organic solvent, such as formamide at a concentration of about 35-50% v/v, may also be used under particular circumstances, such as for RNA:DNA hybridizations. Useful variations on these wash conditions will be readily apparent to those of ordinary skill in the art.

[0111] The terms “percent identity” and “% identity,” as applied to polynucleotide sequences, refer to the percentage of residue matches between at least two polynucleotide sequences aligned using a standardized algorithm. Such an algorithm may insert, in a standardized and reproducible way, gaps in the sequences being compared in order to optimize alignment between two sequences, and therefore achieve a more meaningful comparison of the two sequences. Percent identity may be measured over the length of an entire defined polynucleotide sequence, or may be measured over a shorter length, for example, over the length of a fragment taken from a larger, defined polynucleotide sequence, for instance, a fragment of at least 45, at least 60, at least 90, at least 120, at least 150, at least 210 or at least 450 contiguous residues. Such lengths are exemplary only, and it is understood that any fragment length supported by the sequences shown herein, in the tables, figures or Sequence Listing, may be used to describe a length over which percentage identity may be measured.

[0112] “Percent (%) amino acid sequence identity,” with respect to the polypeptide sequences identified herein, is defined as the percentage of amino acid residues in a query sequence that are identical with the amino acid residues of a second, reference polypeptide sequence or a portion thereof, after aligning the sequences and introducing gaps, if necessary, to achieve the maximum percent sequence identity, and not considering any conservative substitutions as part of the sequence identity. Alignment for purposes of determining percent amino acid sequence identity can be achieved in various ways that are within the skill in the art, for instance, using publicly available computer software such as BLAST, BLAST-2, ALIGN or Megalign (DNASTAR) software. Those skilled in the art can determine appropriate parameters for measuring alignment, including any algorithms needed to achieve maximal alignment over the full length of the sequences being compared. Percent identity may be measured over the length of an entire defined polypeptide sequence, or may be measured over a shorter length, for example, over the length of a fragment taken from a larger, defined polypeptide sequence, for instance, a fragment of at least 15, at least 20, at least 30, at least 40, at least 50, at least 70 or at least 150 contiguous residues. Such lengths are exemplary only, and it is understood that any fragment length supported by the sequences shown herein, in the tables, figures or Sequence Listing, may be used to describe a length over which percentage identity may be measured.

[0113] The term “non-repetitiveness” as used herein in the context of a polypeptide refers to a lack or limited degree of internal homology in a peptide or polypeptide sequence. The term “substantially non-repetitive” can mean, for example, that there are few or no instances of four contiguous amino acids in the sequence that are identical amino acid types or that the polypeptide has a subsequence score (defined infra) of 10 or less or that there isn't a pattern in the order, from N- to C-terminus, of the sequence motifs that constitute the polypeptide sequence. The term “repetitiveness” as used herein in the context of a polypeptide refers to the degree of internal homology in a peptide or polypeptide sequence. In contrast, a “repetitive” sequence may contain multiple identical copies of short amino acid sequences. For instance, a polypeptide sequence of interest may be divided into n-mer sequences and the number of identical sequences can be counted. Highly repetitive sequences contain a large fraction of identical sequences while non-repetitive sequences contain few identical sequences. In the context of a polypeptide, a sequence can contain multiple copies of shorter sequences of defined or variable length, or motifs, in which the motifs themselves have non-repetitive sequences, rendering the full-length polypeptide substantially non-repetitive. The length of polypeptide within which the non-repetitiveness is measured can vary from 3 amino acids to about 200 amino acids, about from 6 to about 50 amino acids, or from about 9 to about 14 amino acids. “Repetitiveness” used in the context of polynucleotide sequences refers to the degree of internal homology in the sequence such as, for example, the frequency of identical nucleotide sequences of a given length. Repetitiveness can, for example, be measured by analyzing the frequency of identical sequences.

[0114] A “vector” is a nucleic acid molecule, preferably self-replicating in an appropriate host, which transfers an inserted nucleic acid molecule into and/or between host cells. The term includes vectors that function primarily for insertion of DNA or RNA into a cell, replication of vectors that function primarily for the replication of DNA or RNA, and expression vectors that function for transcription and/or translation of the DNA or RNA. Also included are vectors that provide more than one of the above functions. An “expression vector” is a polynucleotide which, when introduced into an appropriate host cell, can be transcribed and translated into a polypeptide(s). An “expression system” usually connotes a suitable host cell comprised of an expression vector that can function to yield a desired expression product.

[0115] “Serum degradation resistance,” as applied to a polypeptide, refers to the ability of the polypeptides to withstand degradation in blood or components thereof, which typically involves proteases in the serum or plasma. The serum degradation resistance can be measured by combining the protein with human (or mouse, rat, monkey, as appropriate) serum or plasma, typically for a range of days (e.g. 0.25, 0.5, 1, 2, 4, 8, 16 days), typically at about 37° C. The samples for these time points can be run on a Western blot assay and the protein is detected with an antibody. The antibody can be to a tag in the protein. If the protein shows a single band on the western, where the protein's size is identical to that of the injected protein, then no degradation has occurred. In this exemplary method, the time point where 50% of the protein is degraded, as judged by Western blots or equivalent techniques, is the serum degradation half-life or “serum half-life” of the protein.

[0116] The term “t_{1/2}” as used herein means the terminal half-life calculated as ln(2)/Kₑₗ. Kₑₗ is the terminal elimination rate constant calculated by linear regression of the terminal linear portion of the log concentration vs. time curve. Half-life typically refers to the time required for half the quantity of an administered substance deposited in a living organism to be metabolized or eliminated by normal biological processes. The terms “t_{1/2}”, “terminal half-life”, “elimination half-life” and “circulating half-life” are used interchangeably herein.

[0117] “Apparent Molecular Weight Factor” or “Apparent Molecular Weight” are related terms referring to a measure of the relative increase or decrease in apparent molecular weight exhibited by a particular amino acid sequence. The Apparent Molecular Weight is determined using size exclusion chromatography (SEC) and similar methods compared to globular protein standards and is measured in “apparent kD” units. The Apparent Molecular Weight Factor is the ratio between the Apparent Molecular Weight and the actual molecular weight; the latter predicted by adding, based on amino acid composition, the calculated molecular weight of each type of amino acid in the composition.

[0118] The “hydrodynamic radius” or “Stokes radius” is the effective radius (Rₕ in nm) of a molecule in a solution measured by assuming that it is a body moving through the solution and resisted by the solution's viscosity. In the embodiments of the invention, the hydrodynamic radius measurements of the XTEN fusion proteins correlate with the ‘Apparent Molecular Weight Factor’, which is a more intuitive measure. The “hydrodynamic radius” of a protein affects its rate of diffusion in aqueous solution as well as its ability to migrate in gels of macromolecules. The hydrodynamic radius of a protein is determined by its molecular weight as well as by its structure, including shape and compactness. Methods for determining the hydrodynamic radius are well known in the art, such as by the use of size exclusion chromatography (SEC), as described in U.S. Pat. Nos. 6,406,632 and 7,294,513. Most proteins have globular structure, which is the most compact three-dimensional structure a protein can have with the smallest hydrodynamic radius. Some proteins adopt a random and open, unstructured, or ‘linear’ conformation and as a result have a much larger hydrodynamic radius compared to typical globular proteins of similar molecular weight.

[0119] “Physiological conditions” refer to a set of conditions in a living host as well as in vitro conditions, including temperature, salt concentration, pH, that mimic those conditions of a living subject. A host of physiologically relevant conditions for use in in vitro assays have been established. Generally, a physiological buffer contains a physiological concentration of salt and is adjusted to a neutral pH ranging from about 6.5 to about 7.8, and preferably from about 7.0 to about 7.5. A variety of physiological buffers is listed in Sambrook et al. (1989). Physiologically relevant temperature ranges from about 25° C. to about 38° C., and preferably from about 35° C. to about 37° C.

[0120] A “reactive group” is a chemical structure that can be coupled to a second reactive group. Examples for reactive groups are amino groups, carboxyl groups, sulfhydryl groups, hydroxyl groups, aldehyde groups, azide groups. Some reactive groups can be activated to facilitate coupling with a second reactive group. Non-limiting examples for activation are the reaction of a carboxyl group with carbodiimide, the conversion of a carboxyl group into an activated ester, or the conversion of a carboxyl group into an azide function.

[0121] “Controlled release agent”, “slow release agent”, “depot formulation” or “sustained release agent” are used interchangeably to refer to an agent capable of extending the duration of release of a polypeptide of the invention relative to the duration of release when the polypeptide is administered in the absence of agent. Different embodiments of the present invention may have different release rates, resulting in different therapeutic amounts.

[0122] The terms “antigen”, “target antigen” or “immunogen” are used interchangeably herein to refer to the structure or binding determinant that an antibody fragment or an antibody fragment-based therapeutic binds to or has specificity against.

[0123] The term “payload” as used herein refers to a protein or peptide sequence that has biological or therapeutic activity; the counterpart to the pharmacophore of small molecules. Examples of payloads include, but are not limited to, cytokines, enzymes, hormones and blood and growth factors. Payloads can further comprise genetically fused or chemically conjugated moieties such as chemotherapeutic agents, antiviral compounds, toxins, or contrast agents. These conjugated moieties can be joined to the rest of the polypeptide via a linker that may be cleavable or non-cleavable.

[0124] The term “antagonist”, as used herein, includes any molecule that partially or fully blocks, inhibits, or neutralizes a biological activity of a native polypeptide disclosed herein. Methods for identifying antagonists of a polypeptide may comprise contacting a native polypeptide with a candidate antagonist molecule and measuring a detectable change in one or more biological activities normally associated with the native polypeptide. In the context of the present invention, antagonists may include proteins, nucleic acids, carbohydrates, antibodies or any other molecules that decrease the effect of a biologically active protein.

[0125] The term “agonist” is used in the broadest sense and includes any molecule that mimics a biological activity of a native polypeptide disclosed herein. Suitable agonist molecules specifically include agonist antibodies or antibody fragments, fragments or amino acid sequence variants of native polypeptides, peptides, small organic molecules, etc. Methods for identifying agonists of a native polypeptide may comprise contacting a native polypeptide with a candidate agonist molecule and measuring a detectable change in one or more biological activities normally associated with the native polypeptide.

[0126] “Activity” for the purposes herein refers to an action or effect of a component of a fusion protein consistent with that of the corresponding native biologically active protein, wherein “biological activity” refers to an in vitro or in vivo biological function or effect, including but not limited to receptor binding, antagonist activity, agonist activity, or a cellular or physiologic response.

[0127] As used herein, “treatment” or “treating,” or “palliating” or “ameliorating” is used interchangeably herein. These terms refer to an approach for obtaining beneficial or desired results including but not limited to a therapeutic benefit and/or a prophylactic benefit. By therapeutic benefit is meant eradication or amelioration of the underlying disorder being treated. Also, a therapeutic benefit is achieved with the eradication or amelioration of one or more of the physiological symptoms associated with the underlying disorder such that an improvement is observed in the subject, notwithstanding that the subject may still be afflicted with the underlying disorder. For prophylactic benefit, the compositions may be administered to a subject at risk of developing a particular disease, or to a subject reporting one or more of the physiological symptoms of a disease, even though a diagnosis of this disease may not have been made.

[0128] A “therapeutic effect”, as used herein, refers to a physiologic effect, including but not limited to the cure, mitigation, amelioration, or prevention of disease in humans or other animals, or to otherwise enhance physical or mental wellbeing of humans or animals, caused by a fusion polypeptide of the invention other than the ability to induce the production of an antibody against an antigenic epitope possessed by the biologically active protein. Determination of a therapeutically effective amount is well within the capability of those skilled in the art, especially in light of the detailed disclosure provided herein.

[0129] The terms “therapeutically effective amount” and “therapeutically effective dose”, as used herein, refers to an amount of a biologically active protein, either alone or as a part of a fusion protein composition, that is capable of having any detectable, beneficial effect on any symptom, aspect, measured parameter or characteristics of a disease state or condition when administered in one or repeated doses to a subject. Such effect need not be absolute to be beneficial.

[0130] The term “therapeutically effective dose regimen”, as used herein, refers to a schedule for consecutively administered doses of a biologically active protein, either alone or as a part of a fusion protein composition, wherein the doses are given in therapeutically effective amounts to result in sustained beneficial effect on any symptom, aspect, measured parameter or characteristics of a disease state or condition.

### I). General Techniques

[0131] The practice of the present invention employs, unless otherwise indicated, conventional techniques of immunology, biochemistry, chemistry, molecular biology, microbiology, cell biology, genomics and recombinant DNA, which are within the skill of the art. See Sambrook, J. et al., “Molecular Cloning: A Laboratory Manual,” 3^{rd} edition, Cold Spring Harbor Laboratory Press, 2001; “Current protocols in molecular biology”, F. M. Ausubel, et al. eds.,1987; the series “Methods in Enzymology,” Academic Press, San Diego, Calif.; “PCR 2: a practical approach”, M. J. MacPherson, B. D. Hames and G. R. Taylor eds., Oxford University Press, 1995; “Antibodies, a laboratory manual” Harlow, E. and Lane, D. eds., Cold Spring Harbor Laboratory,1988; “Goodman & Gilman's The Pharmacological Basis of Therapeutics,” 11^{th} Edition, McGraw-Hill, 2005; and Freshney, R. I., “Culture of Animal Cells: A Manual of Basic Technique,” 4^{th} edition, John Wiley & Sons, Somerset, N.J., 2000, the contents of which are incorporated in their entirety herein by reference.

### II). Growth Hormone

[0132] The present invention relates in part to fusion protein compositions of growth hormone (GH), including human growth hormone (hGH).

[0133] (1) Growth Hormone Proteins

[0134] “Growth Hormone” or “GH” means a growth hormone protein and species and sequence variants thereof, and includes, but is not limited to, the 191 single-chain amino acid sequence of human GH. The GH can be the native, full-length protein or can be a truncated fragment or a sequence variant that retains at least a portion of the biological activity of the native protein. There are two known types of human GH (hereinafter “hGH”) derived from the pituitary gland: one having a molecular weight of about 22,000 daltons (22 kD hGH) and the other having a molecular weight of about 20,000 daltons (20 kD hGH). The 20 kD HGH has an amino acid sequence that corresponds to that of 22 kD hGH consisting of 191 amino acids except that 15 amino acid residues from the 32^{nd} to the 46^{th} of 22 kD hGH are missing. Some reports have shown that the 20 kD hGH has been found to exhibit lower risks and higher activity than 22 kD hGH. The invention contemplates use of the 22 kD, the 20 kD hGH, as well as species and sequence variants and truncated fragments thereof as being appropriate for use as a fusion partner with XTEN disclosed herein for GHXTEN compositions. The cloned gene for hGH has been expressed in a secreted form in Eschericha coli (U.S. Pat. No. 4,898,830; Chang, C. N., et al., Gene 55:189 [1987]) and its DNA and amino acid sequence has been reported (Goeddel, et al. Nature, 281:544 [1979); Gray, et al., Gene 39: 247[1985]).

[0135] The invention contemplates inclusion in the GHXTEN compositions sequences with homology to GH sequences, sequence fragments that are natural, such as from humans, non-human primates, mammals (including domestic animals), and non-natural sequence variants which retain at least a portion of the biologic activity or biological function of GH and/or that are useful for preventing, treating, mediating, or ameliorating a GH-related disease, deficiency, disorder or condition. Non-mammalian GH sequences are well-described in the literature. For example, a sequence alignment of fish GHs can be found in Genetics and Molecular Biology 2003 26 p. 295-300. An analysis of the evolution of avian GH sequences is presented in Journal of Evolutionary Biology 2006 19 p. 844-854. In addition, native sequences homologous to human GH may be found by standard homology searching techniques, such as NCBI BLAST.

[0136] Effects of GH on the tissues of the body can generally be described as anabolic. Like most other protein hormones, native GH acts by interacting with a specific plasma membrane receptor, referred to as growth hormone receptor. GH acts on the liver and other tissues to stimulate production of IGF-1, which is responsible for the growth promoting effects of GH and also reflects the amount produced. IGF-1, in turn, has stimulatory effects on osteoblast and chondrocyte activity to promote bone growth. In one embodiment, the invention provides a GHXTEN that exhibits at least one of the properties of native GH hereinabove described herein.

[0137] In one embodiment, the GH incorporated into the subject compositions is a recombinant polypeptide with a sequence corresponding to a protein found in nature. In another embodiment, the GH is a sequence variant, fragment, homolog, or a mimetics of a natural sequence that retains at least a portion of the biological activity of the corresponding native GH. Table 1 provides a non-limiting list of sequences of GHs from a wide variety of mammalian species that are encompassed by the GHXTEN fusion proteins of the invention. Any of these GH sequences or homologous derivatives constructed by shuffling individual mutations between species or families that retain at least a portion of the biological activity of the native GH may be useful for the fusion proteins of this invention. GH that can be incorporated into a GHXTEN fusion protein can include a protein that exhibits at least about 80% sequence identity, or alternatively 81%, 82%, 83%, 84%, 85%, 86%, 87%, 88%, 89%, 90%, 91%, 92%, 93%, 94%, 95%, 96%, 97%, 98%, 99%, or 100% sequence identity to a sequence selected from Table 1.

TABLE 1
Growth hormone amino acid sequences from animal species

| | SEQ ID | |
|---|---|---|
| Species GH | NO: | Amino Acid Sequence |
| Human | 1 | FPTIPLSRLFDNAMLRAHRLHQLAFDTYQEFEEAYIPKEQKYSFLQNPQTSLCF |
| | | SESIPTPSNREETQQKSNLELLRISLLLIQSWLEPVQFLRSVFANSLVYGASDSN |
| | | VYDLLKDLEEGIQTLMGRLEDGSPRTGQIFKQTYSKFDTNSHNDDALLKNYGL |
| | | LYCFRKDMDKVETFLRIVQCRSVEGSCGF |
| Pig | 2 | FPAMPLSSLFANAVLRAQHLHQLAADTYKEFERAYIPEGQRYSIQNAQAAFCF |
| | | SETIPAPTGKDEAQQRSDVELLRFSLLLIQSWLGPVQFLSRVFTNSLVFGTSDR |
| | | VYEKLKDLEEGIQALMRELEDGSPRAGQILKQTYDKFDTNLRSDDALLKNYG |
| | | LLSCFKKDLHKAETYLRV MKCRRFVESSCAF |
| Alpaca | 3 | FPAMPLSSLFANAVLRAQHLHQLAADTYKEFERTYIPEGQRYSIQNAQAAFCF |
| | | SETIPAPTGKDEAQQRSDVELLRFSLLLIQSWLGPVQFLSRVFTNSLVFGTSDR |
| | | VYEKLKDLEEGIQALMRELEDGSPRAGQILRQTYDKFDTNLRSDDALLKNYG |
| | | LLSCFKKDLHKAETYLRV MKCRRFVESSCAF |
| Camel | 4 | FPAMPLSSLFANAVLRAQHLHQLAADTYKEFERTYIPEGQRYSIQNAQAAFCF |
| | | SETIPAPTGKDEAQQRSDVELLRFSLLLIQSWLGPVQFLSRVFTNSLVFGTSDR |
| | | VYEKLKDLEEGIQALMRELEDGSPRAGQILRQTYDKFDTNLRSDDALLKNYG |
| | | LLSCFKKDLHKAETYLRV MKCRRFVESSCAF |
| Horse | 5 | FPAMPLSSLFANAVLRAQHLHQLAADTYKEFERAYIPEGQRYSIQNAQAAFCF |
| | | SETIPAPTGKDEAQQRSDMELLRFSLLLIQSWLGPVQLLSRVFTNSLVFGTSDR |
| | | VYEKLRDLEEGIQALMRELEDGSPRAGQILKQTYDKFDTNLRSDDALLKNYG |
| | | LLSCFKKDLHKAETYLRV MKCRRFVESSCAF |
| Elephant | 6 | FPAMPLSSLFANAVLRAQHLHQLAADTYKEFERAYIPEGQRYSIQNAQAAFCF |
| | | SETIPAPTGKDEAQQRSDVELLRFSLLLIQSWLGPVQFLSRVFTNSLVFGTSDR |
| | | VYEKLKDLEEGIQALMRELEDGSPRPGQVLKQTYDKFDTNMRSDDALLKNY |
| | | GLLSCFKKDLHKAETYLRV MKCRRFVESSCAF |
| Red fox | 7 | FPAMPLSSLFANAVLRAQHLHQLAADTYKEFERAYIPEGQRYSIQNAQAAFCF |
| | | SETIPAPTGKDEAQQRSDVELLRFSLVLIQSWLGPLQFLSRVFTNSLVFGTSDR |
| | | VYEKLKDLEEGIQALMRELEDGSPRAGQILKQTYDKFDTNLRSDDALLKNYG |
| | | LLSCFKKDLHKAETYLRV MKCRRFVESSCAF |
| Dog | 8 | FPAMPLSSLFANAVLRAQHLHQLAADTYKEFERAYIPEGQRYSIQNAQAAFCF |
| | | SETIPAPTGKDEAQQRSDVELLRFSLLLIQSWLGPVQFLSRVFTNSLVFGTSDR |
| | | VYEKLKDLEEGIQALMRELEDGSPRAGQILKQTYDKFDTNLRSDDALLKNYG |
| | | LLSCFKKDLHKAETYLRV MKCRRFVESSCAF |
| Cat | 9 | FPAMPLSSLFANAVLRAQHLHQLAADTYKEFERAYIPEGQRYSIQNAQAAFCF |
| | | SETIPAPTGKDEAQQRSDVELLRFSLLLIQSWLGPVQFLSRVFTNSLVFGTSDR |
| | | VYEKLKDLEEGIQALMRELEDGSPRGGQILKQTYDKFDTNLRSDDALLKNYG |
| | | LLSCFKKDLHKAETYLRV MKCRRFVESSCAF |
| American | 10 | FPAMPLSSLFANAVLRAQHLHQLAADTYKDFERAYIPEGQRYSIQNAQAAFCF |
| mink | | SETIPAPTGKDEAQQRSDMELLRFSLLLIQSWLGPVQFLSRVFTNSLVFGTSDR |
| | | VYEKLKDLEEGIQALMRELEDGSPRAGPILKQTYDKFDTNLRSDDALLKNYGL |
| | | LSCFKKDLHKAETYLRV MKCRRFVESSCAF |
| Finback | 11 | FPAMPLSSLFANAVLRAQHLHQLAADTYKEFERAYIPEGQRYSIQNAQAAFCF |
| whale | | SETIPAPTGKDEAQQRSDVELLRFSLLLIQSWLGPVQFLSRVFTNSLVFGTSDR |
| | | VYEKLKDLEEGIQALMRELEDGSPRAGQILKQTYDKFDTNMRSDDALLKNYG |
| | | LLSCFKKDLHKAETYLRV MKCRRFVESSCAF |
| Dolphin | 12 | FPAMPLSSLFANAVLRAQHLHQLAADTYKEFERAYIPEGQRYSIQNTQAAFCF |
| | | SETIPAPTGKDEAQQRSDVELLRFSLLLIQSWLGPVQFLSRVFTNSLVFGTSDR |
| | | VYEKLKDLEEGIQALMRELEDGSPRAGQILKQTYDKFDTNMRSDDALLKNYG |
| | | LLSCFKKDLHKAETYLRV MKCRRFVESSCAF |
| Hippo | 13 | FPAMPLSSLFANAVLRAQHLHQLAADTYKEFERAYIPEGQRYSIQNTQAAFCF |
| | | SETIPAPTGKDEAQQRSDVELLRFSLLLIQSWLGPVQFLSRVFTNSLVFGTSDR |
| | | VYEKLKDLEEGIQALMRELEDGSPRAGQILKQTYDKFDTNMRSDDALLKNYG |
| | | LLSCFKKDLHKAETYLRV MKCRRFVESSCAF |
| Rabbit | 14 | FPAMPLSSLFANAVLRAQHLHQLAADTYKEFERAYIPEGQRYSIQNAQAAFCF |
| | | SETIPAPTGKDEAQQRSDMELLRFSLLLIQSWLGPVQFLSRAFTNTLVFGTSDR |
| | | VYEKLKDLEEGIQALMRELEDGSPRVGQLLKQTYDKFDTNLRGDDALLKNYG |
| | | LLSCFKKDLHKAETYLRV MKCRRFVESSCVF |
| Rat | 15 | FPAMPLSSLFANAVLRAQHLHQLAADTYKEFERAYIPEGQRYSIQNAQAAFCF |
| | | SETIPAPTGKEEAQQRTDMELLRFSLLLIQSWLGPVQFLSRIFTNSLMFGTSDRV |
| | | YEKLKDLEEGIQALMQELEDGSPRIGQILKQTYDKFDANMRSDDALLKNYGL |
| | | LSCFKKDLHKAETYLRV MKCRRFAESSCAF |
| Mouse | 16 | FPAMPLSSLFSNAVLRAQHLHQLAADTYKEFERAYIPEGQRYSIQNAQAAFCF |
| | | SETIPAPTGKEEAQQRTDMELLRFSLLLIQSWLGPVQFLSRIFTNSLMFGTSDRV |
| | | YEKLKDLEEGIQALMQELEDGSPRVGQILKQTYDKFDANMRSDDALLKNYGL |
| | | LSCFKKDLHKAETYLRV MKCRRFVESSCAF |
| Hamster | 17 | FPAMPLSSLFANAVLRAQHLHQLAADTYKEFERAYIPEGQRYSIQNAQTAFCF |
| | | SETIPAPTGKEEAQQRSDMELLRFSLLLIQSWLGPVQFLSRIFTNSLMFGTSDRV |
| | | YEKLKDLEEGIQALMQELEDGSPRVGQILKQTYDKFDTNMRSDDALLKNYGL |
| | | LSCFKKDLHKAETYLRV MKCRRFVESSCAF |
| Mole rat | 18 | FPAMPLSNLFANAVLRAQHLHQLAADTYKEFERAYIPEGQRYSIQNAQAAFCF |
| | | SETIPAPTGKEEAQQRSDMELLRFSLLLIQSWLGPVQFLSRVFTNSLVFGTSDR |
| | | VFEKLKDLEEGIQALMRELEDGSLRAGQLLKQTYDKFDTNMRSDDALLKNYG |
| | | LLSCFKKDLHKAETYLRV MKCRRFVESSCAF |
| Guinea pig | 19 | FPAMPLSSLFGNAVLRAQHLHQLAADTYKEFERTYIPEGQRYSIHNTQTAFCFS |
| | | ETIPAPTDKEEAQQRSDVELLHFSLLLIQSWLGPVQFLSRVFTNSLVFGTSDRV |
| | | YEKLKDLEEGIQALMRELEDGTPRAGQILKQTYDKFDTNLRSNDALLKNYGL |
| | | LSCFRKDLHRTETYLRV MKCRRFVESSCAF |
| Ox | 20 | AFPAMSLSGLFANAVLRAQHLHQLAADTFKEFERTYIPEGQRYSIQNTQVAFC |
| | | FSETIPAPTGKNEAQQKSDLELLRISLLLIQSWLGPLQFLSRVFTNSLVFGTSDR |
| | | VYEKLKDLEEGILALMRELEDGTPRAGQILKQTYDKFDTNMRSDDALLKNYG |
| | | LLSCFRKDLHKTETYLRV MKCRRFGEASCAF |
| Sheep/Goat | 21 | AFPAMSLSGLFANAVLRAQHLHQLAADTFKEFERTYIPEGQRYSIQNTQVAFC |
| | | FSETIPAPTGKNEAQQKSDLELLRISLLLIQSWLGPLQFLSRVFTNSLVFGTSDR |
| | | VYEKLKDLEEGILALMRELEDVTPRAGQILKQTYDKFDTNMRSDDALLKNYG |
| | | LLSCFRKDLHKTETYLRV MKCRRFGEASCAF |
| Red deer | 22 | FPAMSLSGLFANAVLRAQHLHQLAADTFKEFERTYIPEGQRYSIQNTQVAFCF |
| | | SETIPAPTGKNEAQQKSDLELLRISLLLIQSWLGPLQFLSRVFTNSLVFGTSDRV |
| | | YEKLKDLEEGILALMRELEDGTPRAGQILKQTYDKFDTNMRSDDALLKNYGL |
| | | LSCFRKDLHKTETYLRV MKCRRFGEASCAF |
| Giraffe | 23 | AFPAMSLSGLFANAVLRAQHLHQLAADTFKEFERTYIPEGQRYSIQNTQVAFC |
| | | FSETIPAPTGKNEAQQKSDLELLRISLLLIQSWLGPLQFLSRVFSNSLVFGTSDR |
| | | VYEKLKDLEEGILALMRELEDGTPRAGQILKQTYDKFDTNMRSDDALLKNYG |
| | | LLSCFRKDLHKTETYLRV MKCRRFGEASCAF |
| Chevrotain-1 | 24 | FPAMSLSGLFANAVLRVQHLHQLAADTFKEFERTYIPEGQRYSIQNTQVAFCF |
| | | SETIPAPTGKNEAQQKSDLELLRISLLLIQSWLGPLQFLSRVFTNSLVFGTSDRV |
| | | YEKLKDLEEGILALMRELEDGPPRAGQILKQTYDKFDTNMRSDDALLKNYGL |
| | | LSCFRKDLHKTETYLRV MKCRRFGEASCAF |
| Slow loris | 25 | FPAMPLSSLFANAVLRAQHLHQLAADTYKEFERAYIPEGQRYSIQNAQAAFCF |
| | | SETIPAPTGKDEAQQRSDMELLRFSLLLIQSWLGPVQLLSRVFTNSLVLGTSDR |
| | | VYEKLKDLEEGIQALMRELEDGSPRVGQILKQTYDKFDTNLRSDDALLKNYG |
| | | LLSCFKKDLHKAETYLRV MKCRRFVESSCAF |
| Marmoset | 26 | FPTIPLSRLLDNAMLRAHRLHQLAFDTYQEFEEAYIPKEQKYSFLQNPQTSLCF |
| | | SESIPTPASKKETQQKSNLELLRMSLLLIQSWFEPVQFLRSVFANSLLYGVSDSD |
| | | VYEYLKDLEEGIQTLMGRLEDGSPRTGEIFMQTYRKFDVNSQNNDALLKNYG |
| | | LLYCFRKDMDKVETFLRI VQCR-SVEGSCGF |
| BrTailed | 27 | FPAMPLSSLFANAVLRAQHLHQLVADTYKEFERTYIPEAQRHSIQSTQTAFCFS |
| Possum | | ETIPAPTGKDEAQQRSDVELLRFSLLLIQSWLSPVQFLSRVFTNSLVFGTSDRV |
| | | YEKLRDLEEGIQALMQELEDGSSRGGLVLKTTYDKFDTNLRSDEALLKNYGL |
| | | LSCFKKDLHKAETYLRV MKCRRFVESSCAF |
| Monkey | 28 | FPTIPLSRLFDNAMLRAHRLHQLAFDTYQEFEEAYIPKEQKYSFLQNPQTSLCF |
| (rhesus) | | SESIPTPSNREETQQKSNLELLRISLLLIQSWLEPVQFLRSVFANSLVYGTSYSD |
| | | VYDLLKDLEEGIQTLMGRLEDGSSRTGQIFKQTYSKFDTNSHNNDALLKNYGL |
| | | LYCFRKDMDKIETFLRI VQCR-SVEGSCGF |

### III). Growth Hormone Fusion Protein Compositions

[0138] The present invention relates in part to fusion protein compositions of growth hormone (GH). In one aspect, the invention provides isolated monomeric fusion proteins of GH comprising the full-length sequence or sequence variants of GH covalently linked to extended recombinant recombinant polypeptides (“XTEN” or “XTENs”). As described more fully below, the fusion proteins optionally include spacer sequences that further comprise cleavage sequences to release the GH from the fusion protein when acted on by a protease, releasing GH from the XTEN sequence(s).

[0139] In one aspect, the invention provides an isolated fusion protein comprising at least a first biologically active growth hormone protein covalently linked to one or more extended recombinant polypeptides (“XTEN”), resulting in a growth hormone-XTEN fusion protein composition (hereinafter “GHXTEN”). In one embodiment, the growth hormone is human growth hormone or a sequence variant of hGH. As described more fully below, the fusion proteins optionally include spacer sequences that further comprise cleavage sequences to release the GH from the fusion protein when acted on by a protease.

[0140] The term “GHXTEN”, as used herein, is meant to encompass fusion polypeptides that comprise one or more payload regions each comprising a biologically active GH that mediates one or more biological or therapeutic activities associated with growth hormone and at least one other region comprising at least a first XTEN polypeptide that serves as a carrier.

[0141] The GH of the subject compositions, particularly those disclosed in Table 1, together with their corresponding nucleic acid and amino acid sequences, are well known in the art and descriptions and sequences are available in public databases such as Chemical Abstracts Services Databases (e.g., the CAS Registry), GenBank, The Universal Protein Resource (UniProt) and subscription provided databases such as GenSeq (e.g., Derwent). Polynucleotide sequences may be a wild type polynucleotide sequence encoding a given GH (e.g., either full length or mature), or in some instances the sequence may be a variant of the wild type polynucleotide sequence (e.g., a polynucleotide which encodes the wild type biologically active protein, wherein the DNA sequence of the polynucleotide has been optimized, for example, for expression in a particular species; or a polynucleotide encoding a variant of the wild type protein, such as a site directed mutant or an allelic variant. It is well within the ability of the skilled artisan to use a wild-type or consensus cDNA sequence or a codon-optimized variant of a GH to create GHXTEN constructs contemplated by the invention using methods known in the art and/or in conjunction with the guidance and methods provided herein, and described more fully in the Examples.

[0142] The GH for inclusion in the GHXTEN of the invention include any growth hormone or sequence variant of biologic, therapeutic, prophylactic, or diagnostic interest or function, or that is useful for mediating or preventing or ameliorating a disease, disorder or condition associated with growth, growth hormone deficiency or defect when administered to a subject. Of particular interest are GHXTEN fusion protein compositions for which an increase in a pharmacokinetic parameter, increased solubility, increased stability, or some other enhanced pharmaceutical property compared to native GH is sought, or for which increasing the terminal half-life would improve efficacy, safety, or result in reduce dosing frequency and/or improve patient compliance. Thus, the GHXTEN fusion protein compositions are prepared with various objectives in mind, including improving the therapeutic efficacy of the bioactive GH by, for example, increasing the in vivo exposure or the length that the GHXTEN remains within the therapeutic window when administered to a subject, compared to a GH not linked to XTEN.

[0143] In one embodiment, the GH incorporated into the subject compositions can be a recombinant polypeptide with a sequence corresponding to a protein found in nature. In another embodiment, the GH is a sequence variant, fragment, homolog, or mimetic of a natural sequence that retain at least a portion of the biological activity of the native GH. In non-limiting examples, a GH is a sequence that exhibits at least about 80% sequence identity, or alternatively 81%, 82%, 83%, 84%, 85%, 86%, 87%, 88%, 89%, 90%, 91%, 92%, 93%, 94%, 95%, 96%, 97%, 98%, or at least about 99%, or 100% sequence identity to a protein sequence selected from Table 1. In one embodiment, a GHXTEN fusion protein comprises a single GH molecule linked to an XTEN (as described more fully below). In another embodiment, the GHXTEN comprises a first GH and a second molecule of the same GH, resulting in a fusion protein comprising the two GH linked to one or more XTEN (for example, or two molecules of hGH). In some cases of the foregoing embodiments, the GH and XTEN components are of an N- to C-terminus configuration selected from Table 5. In another embodiment, the GHXTEN fusion protein comprises a single GH molecule linked to a first and a second XTEN, with an N- to C-terminus configuration of XTEN-GH-XTEN, in which the GH is a sequence that exhibits at least about 80% sequence identity, or alternatively 81%, 82%, 83%, 84%, 85%, 86%, 87%, 88%, 89%, 90%, 91%, 92%, 93%, 94%, 95%, 96%, 97%, 98%, or at least about 99%, or 100% sequence identity to a protein sequence selected from Table 1, and the first and/or the second XTEN are sequences that exhibits at least about 80% sequence identity, or alternatively 81%, 82%, 83%, 84%, 85%, 86%, 87%, 88%, 89%, 90%, 91%, 92%, 93%, 94%, 95%, 96%, 97%, 98%, or at least about 99%, or 100% sequence identity to a sequence selected from Table 3.

[0144] In general, the GH fusion partner component of the GHXTEN exhibits a binding specificity to a given target or another desired biological characteristic when used in vivo or when utilized in an in vitro assay. For example, the GHXTEN is an agonist, having the ability to bind to a transmembrane receptor for growth hormone. In one embodiment, the binding of GHXTEN to growth receptor leads to receptor dimerization and lead to at least a portion of the activation of intercellular signal transduction pathway compared to native growth hormone. In one embodiment, the GHXTEN bound to a transmembrane receptor for growth hormone would exhibit at least about 1%, or about 5%, or about 10%, or about 15%, or about 20%, or about 25%, or about 30%, or about 40%, or about 50%, or about 60%, or about 70%, or about 80%, or about 90%, or at least about 95% of the activation of intercellular signal transduction pathway compared to native growth hormone not linked to XTEN.

[0145] The subject GHXTEN of the present invention exhibits an enhancement of one or more pharmacokinetic parameters, which optionally is enhanced by release of GH from the fusion protein by cleavage of a spacer sequence. The GHXTEN with enhanced pharmacokinetic paramters permits less frequent dosing or an enhanced pharmacologic effect, such as but not limited to maintaining the biologically active GHXTEN wthin the therapeutic window between the minimum effective dose or blood concentration (Cₘᵢₙ) and the maximum tolerated dose or blood concentration (Cₘₐₓ). In such cases, the linking of the GH to a fusion protein comprising a select XTEN sequence(s) can result in an improvement in these properties, making them more useful as therapeutic or preventive agents compared to GH not linked to XTEN.

### IV). Xtended Recombinant Polypeptides

[0146] In one aspect, the invention provides XTEN polypeptide compositions that are useful as a fusion protein partner to which GH is linked, resulting in a GHXTEN fusion protein. XTEN are generally extended length polypeptides with non-naturally occurring, substantially non-repetitive sequences that are composed mainly of small hydrophilic amino acids, with the sequence having a low degree or no secondary or tertiary structure under physiologic conditions.

[0147] XTENs have utility as a fusion protein partners partner in that they serve as a “carrier”, conferring certain desirable pharmacokinetic, physicochemical and pharmaceutical properties when linked to a GH protein to a create a fusion protein. Such desirable properties include but are not limited to enhanced pharmacokinetic parameters and solubility characteristicsthe compositions, amongst other properties described herein. Such fusion protein compositions have utility to treat certain growth hormone-related diseases, disorders or conditions, as described herein. As used herein, “XTEN” specifically excludes antibodies or antibody fragments such as single-chain antibodies or Fc fragments of a light chain or a heavy chain.

[0148] In some embodiments, XTEN are long polypeptides having greater than about 100 to about 3000 amino acid residues, preferably greater than 400 to about 3000 residues when used as a carrier or cumulatively when more than one XTEN unit is used in a single fusion protein. In other embodiments, when used as a linker between fusion protein components or where an increase in half-life of the fusion protein is not needed but where an increase in solubility or other physico/chemical property for the GH fusion partner component is desired, an XTEN sequence shorter than 100 amino acid residues, such as about 96, or about 84, or about 72, or about 60, or about 48, or about 36 amino acid residues are incorporated into a fusion protein composition with the GH to effect the property.

[0149] The selection criteria for the XTEN to be linked to the biologically active proteins used to create the inventive fusion proteins compositions generally relate to attributes of physical/chemical properties and conformational structure of the XTEN that is, in turn, used to confer enhanced pharmaceutical and pharmacokinetic properties to the fusion proteins.compositions. The XTEN of the present invention exhibit one or more of the following advantageous properties: conformational flexibility, enhanced aqueous solubility, high degree of protease resistance, low immunogenicity, low binding to mammalian receptors, and increased hydrodynamic (or Stokes) radii; properties that make them particularly useful as fusion protein partners. Non-limiting examples of the properties of the fusion proteins comprising GH that is enhanced by XTEN include increases in the overall solubility and/or metabolic stability, reduced susceptibility to proteolysis, reduced immunogenicity, reduced rate of absorption when administered subcutaneously or intramuscularly, and enhanced pharmacokinetic properties such as longer terminal half-life and increased area under the curve (AUC), slower absorption after subcutaneous or intramuscular injection (compared to GH not linked to XTEN and administered by a similar route) such that the Cₘₐₓ is lower, which, in turn, results in reductions in adverse effects of the GH that, collectively, results in an increased period of time that a fusion protein of a GHXTEN composition administered to a subject retains therapeutic activity.

[0150] A variety of methods and assays are known in the art for determining the physical/chemical properties of proteins such as the compositions comprising the inventive XTEN; properties such as secondary or tertiary structure, solubility, protein aggregation, melting properties, contamination and water content. Such methods include analytical centrifugation, EPR, HPLC-ion exchange, HPLC-size exclusion, HPLC-reverse phase, light scattering, capillary electrophoresis, circular dichroism, differential scanning calorimetry, fluorescence, HPLC-ion exchange, HPLC-size exclusion, IR, NMR, Raman spectroscopy, refractometry, and UV/Visible spectroscopy. Additional methods are disclosed in Arnau et al, Prot Expr and Purif (2006) 48, 1-13. Application of these methods to the invention would be within the grasp of a person skilled in the art.

[0151] Typically, XTEN are designed to behave like denatured peptide sequences under physiological conditions, despite the extended length of the polymer. Denatured describes the state of a peptide in solution that is characterized by a large conformational freedom of the peptide backbone. Most peptides and proteins adopt a denatured conformation in the presence of high concentrations of denaturants or at elevated temperature. Peptides in denatured conformation have, for example, characteristic circular dichroism (CD) spectra and are characterized by a lack of long-range interactions as determined by NMR. “Denatured conformation” and “unstructured conformation” are used synonymously herein. In some embodiments, the invention provides XTEN sequences that, under physiologic conditions, resemble denatured sequences largely devoid in secondary structure. In other cases, the XTEN sequences are substantially devoid of secondary structure under physiologic conditions. “Largely devoid,” as used in this context, means that less than 50% of the XTEN amino acid residues of the XTEN sequence contribute to secondary structure as measured or determined by the means described herein. “Substantially devoid,” as used in this context, means that at least about 60%, or about 70%, or about 80%, or about 90%, or about 95%, or at least about 99% of the XTEN amino acid residues of the XTEN sequence do not contribute to secondary structure, as measured or determined by the methods described herein.

[0152] A variety of methods have been established in the art to discern the presence or absence of secondary and tertiary structures in a given polypeptide. In particular, secondary structure can be measured spectrophotometrically, e.g., by circular dichroism spectroscopy in the “far-UV” spectral region (190-250 nm). Secondary structure elements, such as alpha-helix and beta-sheet, each give rise to a characteristic shape and magnitude of CD spectra. Secondary structure can also be predicted for a polypeptide sequence via certain computer programs or algorithms, such as the well-known Chou-Fasman algorithm (Chou, P. Y., et al. (1974) Biochemistry, 13: 222-45) and the Garnier-Osguthorpe-Robson (“GOR”) algorithm (Garnier J, Gibrat J F, Robson B. (1996), GOR method for predicting protein secondary structure from amino acid sequence. Methods Enzymol 266:540-553), as described in US Patent Application Publication No. 20030228309A1. For a given sequence, the algorithms can predict whether there exists some or no secondary structure at all, expressed as the total and/or percentage of residues of the sequence that form, for example, alpha-helices or beta-sheets or the percentage of residues of the sequence predicted to result in random coil formation (which lacks secondary structure).

[0153] In some embodiments, the XTEN sequences used in the inventive fusion protein compositions can have an alpha-helix percentage ranging from 0% to less than about 5% as determined by the Chou-Fasman algorithm. In other cases, the XTEN sequences of the fusion protein compositions have a beta-sheet percentage ranging from 0% to less than about 5% as determined by the Chou-Fasman algorithm. In some embodiments, the XTEN sequences of the fusion protein compositions have an alpha-helix percentage ranging from 0% to less than about 5% and a beta-sheet percentage ranging from 0% to less than about 5% as determined by the Chou-Fasman algorithm. In some embodiments, the XTEN sequences of the fusion protein compositions have an alpha-helix percentage less than about 2% and a beta-sheet percentage less than about 2%. In other cases, the XTEN sequences of the fusion protein compositions have a high degree of random coil percentage, as determined by the GOR algorithm. In some embodiments, an XTEN sequence have at least about 80%, more preferably at least about 90%, more preferably at least about 91%, more preferably at least about 92%, more preferably at least about 93%, more preferably at least about 94%, more preferably at least about 95%, more preferably at least about 96%, more preferably at least about 97%, more preferably at least about 98%, and most preferably at least about 99% random coil, as determined by the GOR algorithm.

[0154] 1. Non-Repetitive Sequences

[0155] In some embodiments, XTEN sequences of the compositions are substantially non-repetitive. In general, repetitive amino acid sequences have a tendency to aggregate or form higher order structures, as exemplified by natural repetitive sequences such as collagens and leucine zippers, or form contacts resulting in crystalline or pseudocrystaline structures. In contrast, the low tendency of non-repetitive sequences to aggregate enables the design of long-sequence XTENs with a relatively low frequency of charged amino acids that would be likely to aggregate if the sequences were otherwise repetitive. Typically, the GHXTEN fusion proteins comprise XTEN sequences of greater than about 100 to about 3000 amino acid residues, preferably greater than 400 to about 3000 cumuclative residues, wherein the sequences are substantially non-repetitive. In one embodiment, the XTEN sequences have greater than about 100 to about 3000 amino acid residues, preferably greater than 400 to about 3000 amino acid residues, in which no three contiguous amino acids in the sequence are identical amino acid types unless the amino acid is serine, in which case no more than three contiguous amino acids are serine residues. In the foregoing embodiment, the XTEN sequence would be substantially non-repetitive.

[0156] The degree of repetitiveness of a polypeptide or a gene are measured by computer programs or algorithms or by other means known in the art. Repetitiveness in a polypeptide sequence can, for example, be assessed by determining the number of times shorter sequences of a given length occur within the polypeptide. For example, a polypeptide of 200 amino acid residues has 192 overlapping 9-amino acid sequences (or 9-mer “frames”) and 198 3-mer frames, but the number of unique 9-mer or 3-mer sequences will depend on the amount of repetitiveness within the sequence. A score is generated (hereinafter “subsequence score”) that is reflective of the degree of repetitiveness of the subsequences in the overall polypeptide sequence. In the context of the present invention, “subsequence score” means the sum of occurrences of each unique 3-mer frame across a 200 consecutive amino acid sequence of the polypeptide divided by the absolute number of unique 3-mer subsequences within the 200 amino acid sequence. Examples of such subsequence scores derived from the first 200 amino acids of repetitive and non-repetitive polypeptides are presented in Example 44. In some embodiments, the present invention provides GHXTEN each comprising one or more XTEN in which the XTEN have a subsequence score less than 12, more preferably less than 10, more preferably less than 9, more preferably less than 8, more preferably less than 7, more preferably less than 6, and most preferably less than 5. In the embodiments hereinabove described in this paragraph, an XTEN with a subsequence score less than about 10 (i.e., 9, 8, 7, etc.) is “substantially non-repetitive.”

[0157] The non-repetitive characteristic of XTEN impart to fusion proteins with GH a greater degree of solubility and less tendency to aggregate compared to polypeptides having repetitive sequences. These properties facilitate the formulation of XTEN-comprising pharmaceutical preparations containing extremely high drug concentrations, in some cases exceeding 100 mg/ml.

[0158] Furthermore, the XTEN polypeptide sequences of the embodiments are designed to have a low degree of internal repetitiveness in order to reduce or substantially eliminate immunogenicity when administered to a mammal Polypeptide sequences composed of short, repeated motifs largely limited to three amino acids, such as glycine, serine and glutamate, may result in relatively high antibody titers when administered to a mammal despite the absence of predicted T-cell epitopes in these sequences. This may be caused by the repetitive nature of polypeptides, as it has been shown that immunogens with repeated epitopes, including protein aggregates, cross-linked immunogens, and repetitive carbohydrates are highly immunogenic and can, for example, result in the cross-linking of B-cell receptors causing B-cell activation. (Johansson, J., et al. (2007) Vaccine, 25 :1676-82; Yankai, Z., et al. (2006) Biochem Biophys Res Commun, 345 :1365-71; Hsu, C. T., et al. (2000) Cancer Res, 60:3701-5); Bachmann M F, et al. Eur J Immunol. (1995) 25(12):3445-3451).

[0159] 2. Exemplary Sequence Motifs

[0160] The present invention encompasses XTEN that comprise multiple units of shorter sequences, or motifs, in which the amino acid sequences of the motifs are non-repetitive. In designing XTEN sequences, it was discovered that the non-repetitive criterion may be met despite the use of a “building block” approach using a library of sequence motifs that are multimerized to create the XTEN sequences. Thus, while an XTEN sequence may consist of multiple units of as few as four different types of sequence motifs, because the motifs themselves generally consist of non-repetitive amino acid sequences, the overall XTEN sequence is rendered substantially non-repetitive.

[0161] In one embodiment, XTEN have a non-repetitive sequence of greater than about 100 to about 3000 amino acid residues, preferably greater than 400 to about 3000 residues, wherein at least about 80%, or at least about 85%, or at least about 90%, or at least about 95%, or at least about 97%, or about 100% of the XTEN sequence consists of non-overlapping sequence motifs, wherein each of the motifs has about 9 to 36 amino acid residues. In other embodiments, at least about 80%, or at least about 85%, or at least about 90%, or at least about 95%, or at least about 97%, or about 100% of the XTEN sequence consists of non-overlapping sequence motifs wherein each of the motifs has 9 to 14 amino acid residues. In still other embodiments, at least about 80%, or at least about 85%, or at least about 90%, or at least about 95%, or at least about 97%, or about 100% of the XTEN sequence component consists of non-overlapping sequence motifs wherein each of the motifs has 12 amino acid residues. In these embodiments, it is preferred that the sequence motifs be composed mainly of small hydrophilic amino acids, such that the overall sequence has an unstructured, flexible characteristic. Examples of amino acids that are included in XTEN, are, e.g., arginine, lysine, threonine, alanine, asparagine, glutamine, aspartate, glutamate, serine, and glycine. As a result of testing variables such as codon optimization, assembly polynucleotides encoding sequence motifs, expression of protein, charge distribution and solubility of expressed protein, and secondary and tertiary structure, it was discovered that XTEN compositions with enhanced characteristics mainly include glycine (G), alanine (A), serine (S), threonine (T), glutamate (E) and proline (P) residues wherein the sequences are designed to be substantially non-repetitive. In one embodiment, XTEN sequences have predominately four to six types of amino acids selected from glycine (G), alanine (A), serine (S), threonine (T), glutamate (E) or proline (P) that are arranged in a substantially non-repetitive sequence that is greater than about 100 to about 3000 amino acid residues, preferably greater than 400 to about 3000 residues in length. In some embodiments, XTEN have sequences of greater than about 100 to about 3000 amino acid residues, preferably greater than 400 to about 3000 residues, wherein at least about 80% of the sequence consists of non-overlapping sequence motifs wherein each of the motifs has 9 to 36 amino acid residues wherein each of the motifs consists of 4 to 6 types of amino acids selected from glycine (G), alanine (A), serine (S), threonine (T), glutamate (E) and proline (P), and wherein the content of any one amino acid type in the full-length XTEN does not exceed 30%. In other embodiments, at least about 90% of the XTEN sequence consists of non-overlapping sequence motifs wherein each of the motifs has 9 to 36 amino acid residues wherein the motifs consist of 4 to 6 types of amino acids selected from glycine (G), alanine (A), serine (S), threonine (T), glutamate (E) and proline (P), and wherein the content of any one amino acid type in the full-length XTEN does not exceed 30%. In other embodiments, at least about 90% of the XTEN sequence consists of non-overlapping sequence motifs wherein each of the motifs has 12 amino acid residues consisting of 4 to 6 types of amino acids selected from glycine (G), alanine (A), serine (S), threonine (T), glutamate (E) and proline (P), and wherein the content of any one amino acid type in the full-length XTEN does not exceed 30%. In yet other embodiments, at least about 90%, or about 91%, or about 92%, or about 93%, or about 94%, or about 95%, or about 96%, or about 97%, or about 98%, or about 99%, to about 100% of the XTEN sequence consists of non-overlapping sequence motifs wherein each of the motifs has 12 amino acid residues consisting of glycine (G), alanine (A), serine (S), threonine (T), glutamate (E) and proline (P), and wherein the content of any one amino acid type in the full-length XTEN does not exceed 30%.

[0162] In still other embodiments, XTENs comprise non-repetitive sequences of greater than about 100 to about 3000 amino acid residues, preferably greater than 400 to about 3000 amino acid residues wherein at least about 80%, or at least about 90%, or about 91%, or about 92%, or about 93%, or about 94%, or about 95%, or about 96%, or about 97%, or about 98%, or about 99% of the sequence consists of non-overlapping sequence motifs of 9 to 14 amino acid residues wherein the motifs consist of 4 to 6 types of amino acids selected from glycine (G), alanine (A), serine (S), threonine (T), glutamate (E) and proline (P), and wherein the sequence of any two contiguous amino acid residues in any one motif is not repeated more than twice in the sequence motif In other embodiments, at least about 90%, or about 91%, or about 92%, or about 93%, or about 94%, or about 95%, or about 96%, or about 97%, or about 98%, or about 99% of an XTEN sequence consists of non-overlapping sequence motifs of 12 amino acid residues wherein the motifs consist of 4 to 6 types of amino acids selected from glycine (G), alanine (A), serine (S), threonine (T), glutamate (E) and proline (P), and wherein the sequence of any two contiguous amino acid residues in any one sequence motif is not repeated more than twice in the sequence motif. In other embodiments, at least about 90%, or about 91%, or about 92%, or about 93%, or about 94%, or about 95%, or about 96%, or about 97%, or about 98%, or about 99% of an XTEN sequence consists of non-overlapping sequence motifs of 12 amino acid residues wherein the motifs consist of glycine (G), alanine (A), serine (S), threonine (T), glutamate (E) and proline (P), and wherein the sequence of any two contiguous amino acid residues in any one sequence motif is not repeated more than twice in the sequence motif. In yet other embodiments, XTENs consist of 12 amino acid sequence motifs wherein the amino acids are selected from glycine (G), alanine (A), serine (S), threonine (T), glutamate (E) and proline (P), and wherein the sequence of any two contiguous amino acid residues in any one sequence motif is not repeated more than twice in the sequence motif, and wherein the content of any one amino acid type in the full-length XTEN does not exceed 30%. In the foregoing embodiments hereinabove described in this paragraph, the XTEN sequences would be substantially non-repetitive.

[0163] In some embodiments, the invention provides compositions comprising non-repetitive XTEN sequence(s) of greater than about 100 to about 3000 amino acid residues, of cumulatively greater than 400 to about 3000 residues, wherein at least about 80%, or at least about 90%, or about 91%, or about 92%, or about 93%, or about 94%, or about 95%, or about 96%, or about 97%, or about 98%, or about 99% to about 100% of the sequence consists of multiple units of two or more non-overlapping sequence motifs selected from the amino acid sequences of Table 2. In some embodiments, the XTEN comprises non-overlapping sequence motifs in which about 80%, or at least about 90%, or about 91%, or about 92%, or about 93%, or about 94%, or about 95%, or about 96%, or about 97%, or about 98%, or about 99% to about 100% of the sequence consists of two or more non-overlapping sequences selected from a single motif family of Table 2, resulting in a “family” sequence in which the overall sequence remains substantially non-repetitive. Accordingly, in these embodiments, an XTEN sequence comprises multiple units of non-overlapping sequence motifs of the AD motif family, or the AE motif family, or the AF motif family, or the AG motif family, or the AM motif family, or the AQ motif family, or the BC family, or the BD family of sequences of Table 2. In other embodiments, the XTEN comprises motif sequences from two or more of the motif families of Table 2.

TABLE 2
XTEN Sequence Motifs of 12
Amino Acids and Motif Families

| Motif Family* | SEQ ID NO: | MOTIF SEQUENCE |
|---|---|---|
| AD | 29 | GESPGGSSGSES |
| AD | 30 | GSEGSSGPGESS |
| AD | 31 | GSSESGSSEGGP |
| AD | 32 | GSGGEPSESGSS |
| AE, AM | 33 | GSPAGSPTSTEE |
| AE, AM, AQ | 34 | GSEPATSGSETP |
| AE, AM, AQ | 35 | GTSESATPESGP |
| AE, AM, AQ | 36 | GTSTEPSEGSAP |
| AF, AM | 37 | GSTSESPSGTAP |
| AF, AM | 38 | GTSTPESGSASP |
| AF, AM | 39 | GTSPSGESSTAP |
| AF, AM | 40 | GSTSSTAESPGP |
| AG, AM | 41 | GTPGSGTASSSP |
| AG, AM | 42 | GSSTPSGATGSP |
| AG, AM | 43 | GSSPSASTGTGP |
| AG, AM | 44 | GASPGTSSTGSP |
| AQ | 45 | GEPAGSPTSTSE |
| AQ | 46 | GTGEPSSTPASE |
| AQ | 47 | GSGPSTESAPTE |
| AQ | 48 | GSETPSGPSETA |
| AQ | 49 | GPSETSTSEPGA |
| AQ | 50 | GSPSEPTEGTSA |
| BC | 51 | GSGASEPTSTEP |
| BC | 52 | GSEPATSGTEPS |
| BC | 53 | GTSEPSTSEPGA |
| BC | 54 | GTSTEPSEPGSA |
| BD | 55 | GSTAGSETSTEA |
| BD | 56 | GSETATSGSETA |
| BD | 57 | GTSESATSESGA |
| BD | 58 | GTSTEASEGSAS |

*Denotes individual motif sequences that, when used together in various permutations, results in a “family sequence”

[0164] In other embodiments, the GHXTEN composition comprises a non-repetitive XTEN sequence of greater than about 100 to about 3000 amino acid residues, preferably greater than 400 to about 3000 residues, wherein at least about 80%, or at least about 90%, or about 91%, or about 92%, or about 93%, or about 94%, or about 95%, or about 96%, or about 97%, or about 98%, or about 99% to about 100% of the sequence consists of non-overlapping 36 amino acid sequence motifs selected from one or more of the polypeptide sequences of Tables 8-11.

[0165] In those embodiments wherein the XTEN component of the GHXTEN fusion protein has less than 100% of its amino acids consisting of four to six amino acid selected from glycine (G), alanine (A), serine (S), threonine (T), glutamate (E) and proline (P), or less than 100% of the sequence consisting of the sequence motifs of Table 2, or less than 100% sequence identity with an XTEN from Table 3, the other amino acid residues are selected from any other of the 14 natural L-amino acids, but are preferentially selected from hydrophilic amino acids such that the XTEN sequence contains at least about 90%, or at least about 91%, or at least about 92%, or at least about 93%, or at least about 94%, or at least about 95%, or at least about 96%, or at least about 97%, or at least about 98%, or at least about 99% hydrophilic amino acids. The XTEN amino acids that are not glycine (G), alanine (A), serine (S), threonine (T), glutamate (E) and proline (P) are interspersed throughout the XTEN sequence, are located within or between the sequence motifs, or are concentrated in one or more short stretches of the XTEN sequence. In such cases where the XTEN component of the GHXTEN comprises amino acids other than glycine (G), alanine (A), serine (S), threonine (T), glutamate (E) and proline (P), it is preferred that the amino acids not be hydrophobic residues and should not substantially confer secondary structure of the XTEN component. Hydrophobic residues that are less favored in construction of XTEN include tryptophan, phenylalanine, tyrosine, leucine, isoleucine, valine, and methionine. Additionally, one can design the XTEN sequences to contain few (e.g. less than 5%) or none of the following amino acids: cysteine (to avoid disulfide formation and oxidation), methionine (to avoid oxidation), asparagine and glutamine (to avoid desamidation). Thus, in some embodiments, the XTEN component of the GHXTEN fusion protein comprising other amino acids in addition to glycine (G), alanine (A), serine (S), threonine (T), glutamate (E) and proline (P) would have a sequence with less than 5% of the residues contributing to alpha-helices and beta-sheets as measured by the Chou-Fasman algorithm and have at least 90%, or at least about 95% or more random coil formation as measured by the GOR algorithm.

[0166] 3. Length of Sequence

[0167] In another aspect of the present invention, the invention encompasses GHXTEN compositions comprising carriers of XTEN polypeptides with extended length sequences. The present invention makes use of the discovery that increasing the length of non-repetitive, unstructured polypeptides enhances the unstructured nature of the XTENs and correspoindingly enhances the biological and pharmacokinetic properties of fusion proteins comprising the XTEN carrier. As described more fully in the Examples, proportional increases in the length of the XTEN, even if created by a fixed repeat order of single family sequence motifs (e.g., the four AE motifs of Table 2), result in a sequence with a higher percentage of random coil formation, as determined by GOR algorithm, compared to shorter XTEN lengths. In general, increasing the length of the unstructured polypeptide fusion partner, as described in the Examples, results in a fusion protein with a disproportional increase in terminal half-life compared to fusion proteins with unstructured polypeptide partners with shorter sequence lengths.

[0168] Non-limiting examples of XTEN contemplated for inclusion in the GHXTEN of the invention are presented in Table 3. In one embodiment, the invention provides GHXTEN compositions wherein the XTEN sequence length of the fusion protein(s) is greater than about 100 to about 3000 amino acid residues, and in some cases is greater than 400 to about 3000 amino acid residues, wherein the XTEN confers enhanced pharmacokinetic properties on the GHXTEN in comparison to GH not linked to XTEN. In some embodiments, the XTEN sequences of the GHXTEN compositions of the present invention can be about 100, or about 144, or about 288, or about 401, or about 500, or about 600, or about 700, or about 800, or about 900, or about 1000, or about 1500, or about 2000, or about 2500 or up to about 3000 amino acid residues in length. In other cases, the XTEN sequences can be about 100 to 150, about 150 to 250, about 250 to 400, 401 to about 500, about 500 to 900, about 900 to 1500, about 1500 to 2000, or about 2000 to about 3000 amino acid residues in length. In one embodiment, the GHXTEN can comprise an XTEN sequence wherein the sequence exhibits at least about 80% sequence identity, or alternatively 81%, 82%, 83%, 84%, 85%, 86%, 87%, 88%, 89%, 90%, 91%, 92%, 93%, 94%, 95%, 96%, 97%, 98%, 99%, or 100% sequence identity to a XTEN selected from Table 3. In some embodiments, the XTEN sequence is designed for optimized expression as the N-terminal component of the GHXTEN by inclusion of encoding nucleotides for an optimized N-terminal leader sequence (NTS) in the XTEN portion of the gene encoding the fusion protein. In one embodiment, the N-terminal XTEN sequence of the expressed GHXTEN has at least 90% sequence identity to the sequence of AE48 or AM48, AE624, or AE912 or AM923. In another embodiment, the XTEN has the N-terminal residues described in Examples 14-17.

[0169] In other embodiments, the GHXTEN fusion protein comprises a first and a second XTEN sequence, wherein the cumulative total of the residues in the XTEN sequences is greater than about 400 to about 3000 amino acid residues. In embodiments of the foregoing, the GHXTEN fusion protein comprises a first and a second XTEN sequence wherein the sequences each exhibit at least about 80% sequence identity, or alternatively 81%, 82%, 83%, 84%, 85%, 86%, 87%, 88%, 89%, 90%, 91%, 92%, 93%, 94%, 95%, 96%, 97%, 98%, 99%, or 100% sequence identity to at least a first or additionally a second XTEN selected from Table 3. Examples where more than one XTEN is used in a GHXTEN composition include, but are not limited to constructs with an XTEN linked to both the N- and C-termini of at least one GH.

[0170] As described more fully below, the invention provides methods in which the GHXTEN is designed by selecting the length of the XTEN to confer a target half-life on a fusion protein administered to a subject. In general, XTEN lengths longer that about cumulative 400 residues incorporated into the GHXTEN compositions result in longer half-life compared to shorter cumulative lengths; e.g., shorter than about 280 residues. However, in another embodiment, GHXTEN fusion proteins are designed to comprise XTEN with a longer sequence length that is selected to additionally confer slower rates of systemic absorption after subcutaneous or intramuscular administration to a subject. In such embodiments, the Cₘₐₓ is reduced in comparison to a comparable dose of a GH not linked to XTEN, thereby contributing to the ability to keep the GHXTEN within the therapeutic window for the composition. Thus, the XTEN confers the property of a depot to the administered GHXTEN, in addition to the other physical/chemical properties described herein.

TABLE 3
XTEN Polypeptides

| XTEN | SEQ ID | |
|---|---|---|
| Name | NO: | Amino Acid Sequence |
| AE48 | 59 | MAEPAGSPTSTEEGTPGSGTASSSPGSSTPSGATGSPGASPGTSSTGS |
| AM48 | 60 | MAEPAGSPTSTEEGASPGTSSTGSPGSSTPSGATGSPGSSTPSGATGS |
| AE144 | 61 | GSEPATSGSETPGTSESATPESGPGSEPATSGSETPGSPAGSPTSTEEGTSTE |
| | | PSEGSAPGSEPATSGSETPGSEPATSGSETPGSEPATSGSETPGTSTEPSEGS |
| | | APGTSESATPESGPGSEPATSGSETPGTSTEPSEGSAP |
| AF144 | 62 | GTSTPESGSASPGTSPSGESSTAPGTSPSGESSTAPGSTSSTAESPGPGSTSES |
| | | PSGTAPGSTSSTAESPGPGTSPSGESSTAPGTSTPESGSASPGSTSSTAESPG |
| | | PGTSPSGESSTAPGTSPSGESSTAPGTSPSGESSTAP |
| AE288 | 63 | GTSESATPESGPGSEPATSGSETPGTSESATPESGPGSEPATSGSETPGTSES |
| | | ATPESGPGTSTEPSEGSAPGSPAGSPTSTEEGTSESATPESGPGSEPATSGSE |
| | | TPGTSESATPESGPGSPAGSPTSTEEGSPAGSPTSTEEGTSTEPSEGSAPGTS |
| | | ESATPESGPGTSESATPESGPGTSESATPESGPGSEPATSGSETPGSEPATSG |
| | | SETPGSPAGSPTSTEEGTSTEPSEGSAPGTSTEPSEGSAPGSEPATSGSETPG |
| | | TSESATPESGPGTSTEPSEGSAP |
| AF504 | 64 | GASPGTSSTGSPGSSPSASTGTGPGSSPSASTGTGPGTPGSGTASSSPGSSTP |
| | | SGATGSPGSXPSASTGTGPGASPGTSSTGSPGTPGSGTASSSPGSSTPSGAT |
| | | GSPGTPGSGTASSSPGASPGTSSTGSPGASPGTSSTGSPGTPGSGTASSSPGS |
| | | STPSGATGSPGASPGTSSTGSPGTPGSGTASSSPGSSTPSGATGSPGSXPSAS |
| | | TGTGPGSSPSASTGTGPGSSTPSGATGSPGSSTPSGATGSPGASPGTSSTGSP |
| | | GASPGTSSTGSPGASPGTSSTGSPGTPGSGTASSSPGASPGTSSTGSPGASP |
| | | GTSSTGSPGASPGTSSTGSPGSSPSASTGTGPGTPGSGTASSSPGASPGTSST |
| | | GSPGASPGTSSTGSPGASPGTSSTGSPGSSTPSGATGSPGSSTPSGATGSPG |
| | | ASPGTSSTGSPGTPGSGTASSSPGSSTPSGATGSPGSSTPSGATGSPGSSTPS |
| | | GATGSPGSSPSASTGTGPGASPGTSSTGSP |
| AF540 | 65 | GSTSSTAESPGPGSTSSTAESPGPGSTSESPSGTAPGSTSSTAESPGPGSTSST |
| | | AESPGPGTSTPESGSASPGSTSESPSGTAPGTSPSGESSTAPGSTSESPSGTA |
| | | PGSTSESPSGTAPGTSPSGESSTAPGSTSESPSGTAPGSTSESPSGTAPGTSPS |
| | | GESSTAPGSTSESPSGTAPGSTSESPSGTAPGSTSESPSGTAPGTSTPESGSA |
| | | SPGSTSESPSGTAPGTSTPESGSASPGSTSSTAESPGPGSTSSTAESPGPGTST |
| | | PESGSASPGTSTPESGSASPGSTSESPSGTAPGTSTPESGSASPGTSTPESGS |
| | | ASPGSTSESPSGTAPGSTSESPSGTAPGSTSESPSGTAPGSTSSTAESPGPGT |
| | | STPESGSASPGTSTPESGSASPGSTSESPSGTAPGSTSESPSGTAPGTSTPESG |
| | | SASPGSTSESPSGTAPGSTSESPSGTAPGTSTPESGSASPGTSPSGESSTAPGS |
| | | TSSTAESPGPGTSPSGESSTAPGSTSSTAESPGPGTSTPESGSASPGSTSESPS |
| | | GTAP |
| AD576 | 66 | GSSESGSSEGGPGSGGEPSESGSSGSSESGSSEGGPGSSESGSSEGGPGSSES |
| | | GSSEGGPGSSESGSSEGGPGSSESGSSEGGPGESPGGSSGSESGSEGSSGPG |
| | | ESSGSSESGSSEGGPGSSESGSSEGGPGSSESGSSEGGPGSGGEPSESGSSGE |
| | | SPGGSSGSESGESPGGSSGSESGSGGEPSESGSSGSSESGSSEGGPGSGGEPS |
| | | ESGSSGSGGEPSESGSSGSEGSSGPGESSGESPGGSSGSESGSGGEPSESGSS |
| | | GSGGEPSESGSSGSGGEPSESGSSGSSESGSSEGGPGESPGGSSGSESGESPG |
| | | GSSGSESGESPGGSSGSESGESPGGSSGSESGESPGGSSGSESGSSESGSSEG |
| | | GPGSGGEPSESGSSGSEGSSGPGESSGSSESGSSEGGPGSGGEPSESGSSGSS |
| | | ESGSSEGGPGSGGEPSESGSSGESPGGSSGSESGESPGGSSGSESGSSESGSS |
| | | EGGPGSGGEPSESGSSGSSESGSSEGGPGSGGEPSESGSSGSGGEPSESGSS |
| | | GESPGGSSGSESGSEGSSGPGESSGSSESGSSEGGPGSEGSSGPGESS |
| AE576 | 67 | GSPAGSPTSTEEGTSESATPESGPGTSTEPSEGSAPGSPAGSPTSTEEGTSTE |
| | | PSEGSAPGTSTEPSEGSAPGTSESATPESGPGSEPATSGSETPGSEPATSGSE |
| | | TPGSPAGSPTSTEEGTSESATPESGPGTSTEPSEGSAPGTSTEPSEGSAPGSP |
| | | AGSPTSTEEGTSTEPSEGSAPGTSTEPSEGSAPGTSESATPESGPGTSTEPSE |
| | | GSAPGTSESATPESGPGSEPATSGSETPGTSTEPSEGSAPGTSTEPSEGSAPG |
| | | TSESATPESGPGTSESATPESGPGSPAGSPTSTEEGTSESATPESGPGSEPAT |
| | | SGSETPGTSESATPESGPGTSTEPSEGSAPGTSTEPSEGSAPGTSTEPSEGSA |
| | | PGTSTEPSEGSAPGTSTEPSEGSAPGTSTEPSEGSAPGSPAGSPTSTEEGTST |
| | | EPSEGSAPGTSESATPESGPGSEPATSGSETPGTSESATPESGPGSEPATSGS |
| | | ETPGTSESATPESGPGTSTEPSEGSAPGTSESATPESGPGSPAGSPTSTEEGS |
| | | PAGSPTSTEEGSPAGSPTSTEEGTSESATPESGPGTSTEPSEGSAP |
| AF576 | 68 | GSTSSTAESPGPGSTSSTAESPGPGSTSESPSGTAPGSTSSTAESPGPGSTSST |
| | | AESPGPGTSTPESGSASPGSTSESPSGTAPGTSPSGESSTAPGSTSESPSGTA |
| | | PGSTSESPSGTAPGTSPSGESSTAPGSTSESPSGTAPGSTSESPSGTAPGTSPS |
| | | GESSTAPGSTSESPSGTAPGSTSESPSGTAPGSTSESPSGTAPGTSTPESGSA |
| | | SPGSTSESPSGTAPGTSTPESGSASPGSTSSTAESPGPGSTSSTAESPGPGTST |
| | | PESGSASPGTSTPESGSASPGSTSESPSGTAPGTSTPESGSASPGTSTPESGS |
| | | ASPGSTSESPSGTAPGSTSESPSGTAPGSTSESPSGTAPGSTSSTAESPGPGT |
| | | STPESGSASPGTSTPESGSASPGSTSESPSGTAPGSTSESPSGTAPGTSTPESG |
| | | SASPGSTSESPSGTAPGSTSESPSGTAPGTSTPESGSASPGTSPSGESSTAPGS |
| | | TSSTAESPGPGTSPSGESSTAPGSTSSTAESPGPGTSTPESGSASPGSTSESPS |
| | | GTAPGSTSSTAESPGPGTSTPESGSASPGTSTPESGSASP |
| AE624 | 69 | MAEPAGSPTSTEEGTPGSGTASSSPGSSTPSGATGSPGASPGTSSTGSPGSP |
| | | AGSPTSTEEGTSESATPESGPGTSTEPSEGSAPGSPAGSPTSTEEGTSTEPSE |
| | | GSAPGTSTEPSEGSAPGTSESATPESGPGSEPATSGSETPGSEPATSGSETPG |
| | | SPAGSPTSTEEGTSESATPESGPGTSTEPSEGSAPGTSTEPSEGSAPGSPAGS |
| | | PTSTEEGTSTEPSEGSAPGTSTEPSEGSAPGTSESATPESGPGTSTEPSEGSA |
| | | PGTSESATPESGPGSEPATSGSETPGTSTEPSEGSAPGTSTEPSEGSAPGTSE |
| | | SATPESGPGTSESATPESGPGSPAGSPTSTEEGTSESATPESGPGSEPATSGS |
| | | ETPGTSESATPESGPGTSTEPSEGSAPGTSTEPSEGSAPGTSTEPSEGSAPGT |
| | | STEPSEGSAPGTSTEPSEGSAPGTSTEPSEGSAPGSPAGSPTSTEEGTSTEPS |
| | | EGSAPGTSESATPESGPGSEPATSGSETPGTSESATPESGPGSEPATSGSETP |
| | | GTSESATPESGPGTSTEPSEGSAPGTSESATPESGPGSPAGSPTSTEEGSPAG |
| | | SPTSTEEGSPAGSPTSTEEGTSESATPESGPGTSTEPSEGSAP |
| AD836 | 70 | GSSESGSSEGGPGSSESGSSEGGPGESPGGSSGSESGSGGEPSESGSSGESPG |
| | | GSSGSESGESPGGSSGSESGSSESGSSEGGPGSSESGSSEGGPGSSESGSSEG |
| | | GPGESPGGSSGSESGESPGGSSGSESGESPGGSSGSESGSSESGSSEGGPGSS |
| | | ESGSSEGGPGSSESGSSEGGPGSSESGSSEGGPGSSESGSSEGGPGSSESGSS |
| | | EGGPGSGGEPSESGSSGESPGGSSGSESGESPGGSSGSESGSGGEPSESGSS |
| | | GSEGSSGPGESSGSSESGSSEGGPGSGGEPSESGSSGSEGSSGPGESSGSSES |
| | | GSSEGGPGSGGEPSESGSSGESPGGSSGSESGSGGEPSESGSSGSGGEPSES |
| | | GSSGSSESGSSEGGPGSGGEPSESGSSGSGGEPSESGSSGSEGSSGPGESSGE |
| | | SPGGSSGSESGSEGSSGPGESSGSEGSSGPGESSGSGGEPSESGSSGSSESGS |
| | | SEGGPGSSESGSSEGGPGESPGGSSGSESGSGGEPSESGSSGSEGSSGPGESS |
| | | GESPGGSSGSESGSEGSSGPGSSESGSSEGGPGSGGEPSESGSSGSEGSSGP |
| | | GESSGSEGSSGPGESSGSEGSSGPGESSGSGGEPSESGSSGSGGEPSESGSSG |
| | | ESPGGSSGSESGESPGGSSGSESGSGGEPSESGSSGSEGSSGPGESSGESPGG |
| | | SSGSESGSSESGSSEGGPGSSESGSSEGGPGSSESGSSEGGPGSGGEPSESGS |
| | | SGSSESGSSEGGPGESPGGSSGSESGSGGEPSESGSSGSSESGSSEGGPGESP |
| | | GGSSGSESGSGGEPSESGSSGESPGGSSGSESGSGGEPSESGSS |
| AE864 | 71 | GSPAGSPTSTEEGTSESATPESGPGTSTEPSEGSAPGSPAGSPTSTEEGTSTE |
| | | PSEGSAPGTSTEPSEGSAPGTSESATPESGPGSEPATSGSETPGSEPATSGSE |
| | | TPGSPAGSPTSTEEGTSESATPESGPGTSTEPSEGSAPGTSTEPSEGSAPGSP |
| | | AGSPTSTEEGTSTEPSEGSAPGTSTEPSEGSAPGTSESATPESGPGTSTEPSE |
| | | GSAPGTSESATPESGPGSEPATSGSETPGTSTEPSEGSAPGTSTEPSEGSAPG |
| | | TSESATPESGPGTSESATPESGPGSPAGSPTSTEEGTSESATPESGPGSEPAT |
| | | SGSETPGTSESATPESGPGTSTEPSEGSAPGTSTEPSEGSAPGTSTEPSEGSA |
| | | PGTSTEPSEGSAPGTSTEPSEGSAPGTSTEPSEGSAPGSPAGSPTSTEEGTST |
| | | EPSEGSAPGTSESATPESGPGSEPATSGSETPGTSESATPESGPGSEPATSGS |
| | | ETPGTSESATPESGPGTSTEPSEGSAPGTSESATPESGPGSPAGSPTSTEEGS |
| | | PAGSPTSTEEGSPAGSPTSTEEGTSESATPESGPGTSTEPSEGSAPGTSESAT |
| | | PESGPGSEPATSGSETPGTSESATPESGPGSEPATSGSETPGTSESATPESGP |
| | | GTSTEPSEGSAPGSPAGSPTSTEEGTSESATPESGPGSEPATSGSETPGTSES |
| | | ATPESGPGSPAGSPTSTEEGSPAGSPTSTEEGTSTEPSEGSAPGTSESATPES |
| | | GPGTSESATPESGPGTSESATPESGPGSEPATSGSETPGSEPATSGSETPGSP |
| | | AGSPTSTEEGTSTEPSEGSAPGTSTEPSEGSAPGSEPATSGSETPGTSESATP |
| | | ESGPGTSTEPSEGSAP |
| AF864 | 72 | GSTSESPSGTAPGTSPSGESSTAPGSTSESPSGTAPGSTSESPSGTAPGTSTPE |
| | | SGSASPGTSTPESGSASPGSTSESPSGTAPGSTSESPSGTAPGTSPSGESSTAP |
| | | GSTSESPSGTAPGTSPSGESSTAPGTSPSGESSTAPGSTSSTAESPGPGTSPS |
| | | GESSTAPGTSPSGESSTAPGSTSSTAESPGPGTSTPESGSASPGTSTPESGSA |
| | | SPGSTSESPSGTAPGSTSESPSGTAPGTSTPESGSASPGSTSSTAESPGPGTST |
| | | PESGSASPGSTSESPSGTAPGTSPSGESSTAPGSTSSTAESPGPGTSPSGESST |
| | | APGTSTPESGSASPGSTSSTAESPGPGSTSSTAESPGPGSTSSTAESPGPGST |
| | | SSTAESPGPGTSPSGESSTAPGSTSESPSGTAPGSTSESPSGTAPGTSTPESGP |
| | | XXXGASASGAPSTXXXXSESPSGTAPGSTSESPSGTAPGSTSESPSGTAPGS |
| | | TSESPSGTAPGSTSESPSGTAPGSTSESPSGTAPGTSTPESGSASPGTSPSGES |
| | | STAPGTSPSGESSTAPGSTSSTAESPGPGTSPSGESSTAPGTSTPESGSASPG |
| | | STSESPSGTAPGSTSESPSGTAPGTSPSGESSTAPGSTSESPSGTAPGTSTPES |
| | | GSASPGTSTPESGSASPGSTSESPSGTAPGTSTPESGSASPGSTSSTAESPGP |
| | | GSTSESPSGTAPGSTSESPSGTAPGTSPSGESSTAPGSTSSTAESPGPGTSPS |
| | | GESSTAPGTSTPESGSASPGTSPSGESSTAPGTSPSGESSTAPGTSPSGESST |
| | | APGSTSSTAESPGPGSTSSTAESPGPGTSPSGESSTAPGSSPSASTGTGPGSS |
| | | TPSGATGSPGSSTPSGATGSP |
| AG864 | 73 | GASPGTSSTGSPGSSPSASTGTGPGSSPSASTGTGPGTPGSGTASSSPGSSTP |
| | | SGATGSPGSSPSASTGTGPGASPGTSSTGSPGTPGSGTASSSPGSSTPSGAT |
| | | GSPGTPGSGTASSSPGASPGTSSTGSPGASPGTSSTGSPGTPGSGTASSSPGS |
| | | STPSGATGSPGASPGTSSTGSPGTPGSGTASSSPGSSTPSGATGSPGSSPSAS |
| | | TGTGPGSSPSASTGTGPGSSTPSGATGSPGSSTPSGATGSPGASPGTSSTGSP |
| | | GASPGTSSTGSPGASPGTSSTGSPGTPGSGTASSSPGASPGTSSTGSPGASP |
| | | GTSSTGSPGASPGTSSTGSPGSSPSASTGTGPGTPGSGTASSSPGASPGTSST |
| | | GSPGASPGTSSTGSPGASPGTSSTGSPGSSTPSGATGSPGSSTPSGATGSPG |
| | | ASPGTSSTGSPGTPGSGTASSSPGSSTPSGATGSPGSSTPSGATGSPGSSTPS |
| | | GATGSPGSSPSASTGTGPGASPGTSSTGSPGASPGTSSTGSPGTPGSGTASS |
| | | SPGASPGTSSTGSPGASPGTSSTGSPGASPGTSSTGSPGASPGTSSTGSPGTP |
| | | GSGTASSSPGSSTPSGATGSPGTPGSGTASSSPGSSTPSGATGSPGTPGSGT |
| | | ASSSPGSSTPSGATGSPGSSTPSGATGSPGSSPSASTGTGPGSSPSASTGTGP |
| | | GASPGTSSTGSPGTPGSGTASSSPGSSTPSGATGSPGSSPSASTGTGPGSSPS |
| | | ASTGTGPGASPGTSSTGSPGASPGTSSTGSPGSSTPSGATGSPGSSPSASTGT |
| | | GPGASPGTSSTGSPGSSPSASTGTGPGTPGSGTASSSPGSSTPSGATGSPGSS |
| | | TPSGATGSPGASPGTSSTGSP |
| AM875 | 74 | GTSTEPSEGSAPGSEPATSGSETPGSPAGSPTSTEEGSTSSTAESPGPGTSTP |
| | | ESGSASPGSTSESPSGTAPGSTSESPSGTAPGTSTPESGSASPGTSTPESGSA |
| | | SPGSEPATSGSETPGTSESATPESGPGSPAGSPTSTEEGTSTEPSEGSAPGTS |
| | | ESATPESGPGTSTEPSEGSAPGTSTEPSEGSAPGSPAGSPTSTEEGTSTEPSE |
| | | GSAPGTSTEPSEGSAPGTSESATPESGPGTSESATPESGPGTSTEPSEGSAPG |
| | | TSTEPSEGSAPGTSESATPESGPGTSTEPSEGSAPGSEPATSGSETPGSPAGS |
| | | PTSTEEGSSTPSGATGSPGTPGSGTASSSPGSSTPSGATGSPGTSTEPSEGSA |
| | | PGTSTEPSEGSAPGSEPATSGSETPGSPAGSPTSTEEGSPAGSPTSTEEGTST |
| | | EPSEGSAPGASASGAPSTGGTSESATPESGPGSPAGSPTSTEEGSPAGSPTST |
| | | EEGSTSSTAESPGPGSTSESPSGTAPGTSPSGESSTAPGTPGSGTASSSPGSS |
| | | TPSGATGSPGSSPSASTGTGPGSEPATSGSETPGTSESATPESGPGSEPATSG |
| | | SETPGSTSSTAESPGPGSTSSTAESPGPGTSPSGESSTAPGSEPATSGSETPGS |
| | | EPATSGSETPGTSTEPSEGSAPGSTSSTAESPGPGTSTPESGSASPGSTSESPS |
| | | GTAPGTSTEPSEGSAPGTSTEPSEGSAPGTSTEPSEGSAPGSSTPSGATGSPG |
| | | SSPSASTGTGPGASPGTSSTGSPGSEPATSGSETPGTSESATPESGPGSPAGS |
| | | PTSTEEGSSTPSGATGSPGSSPSASTGTGPGASPGTSSTGSPGTSESATPESG |
| | | PGTSTEPSEGSAPGTSTEPSEGSAP |
| AE912 | 75 | MAEPAGSPTSTEEGTPGSGTASSSPGSSTPSGATGSPGASPGTSSTGSPGSP |
| | | AGSPTSTEEGTSESATPESGPGTSTEPSEGSAPGSPAGSPTSTEEGTSTEPSE |
| | | GSAPGTSTEPSEGSAPGTSESATPESGPGSEPATSGSETPGSEPATSGSETPG |
| | | SPAGSPTSTEEGTSESATPESGPGTSTEPSEGSAPGTSTEPSEGSAPGSPAGS |
| | | PTSTEEGTSTEPSEGSAPGTSTEPSEGSAPGTSESATPESGPGTSTEPSEGSA |
| | | PGTSESATPESGPGSEPATSGSETPGTSTEPSEGSAPGTSTEPSEGSAPGTSE |
| | | SATPESGPGTSESATPESGPGSPAGSPTSTEEGTSESATPESGPGSEPATSGS |
| | | ETPGTSESATPESGPGTSTEPSEGSAPGTSTEPSEGSAPGTSTEPSEGSAPGT |
| | | STEPSEGSAPGTSTEPSEGSAPGTSTEPSEGSAPGSPAGSPTSTEEGTSTEPS |
| | | EGSAPGTSESATPESGPGSEPATSGSETPGTSESATPESGPGSEPATSGSETP |
| | | GTSESATPESGPGTSTEPSEGSAPGTSESATPESGPGSPAGSPTSTEEGSPAG |
| | | SPTSTEEGSPAGSPTSTEEGTSESATPESGPGTSTEPSEGSAPGTSESATPES |
| | | GPGSEPATSGSETPGTSESATPESGPGSEPATSGSETPGTSESATPESGPGTS |
| | | TEPSEGSAPGSPAGSPTSTEEGTSESATPESGPGSEPATSGSETPGTSESATP |
| | | ESGPGSPAGSPTSTEEGSPAGSPTSTEEGTSTEPSEGSAPGTSESATPESGPG |
| | | TSESATPESGPGTSESATPESGPGSEPATSGSETPGSEPATSGSETPGSPAGS |
| | | PTSTEEGTSTEPSEGSAPGTSTEPSEGSAPGSEPATSGSETPGTSESATPESG |
| | | PGTSTEPSEGSAP |
| AM923 | 76 | MAEPAGSPTSTEEGASPGTSSTGSPGSSTPSGATGSPGSSTPSGATGSPGTS |
| | | TEPSEGSAPGSEPATSGSETPGSPAGSPTSTEEGSTSSTAESPGPGTSTPESG |
| | | SASPGSTSESPSGTAPGSTSESPSGTAPGTSTPESGSASPGTSTPESGSASPGS |
| | | EPATSGSETPGTSESATPESGPGSPAGSPTSTEEGTSTEPSEGSAPGTSESAT |
| | | PESGPGTSTEPSEGSAPGTSTEPSEGSAPGSPAGSPTSTEEGTSTEPSEGSAP |
| | | GTSTEPSEGSAPGTSESATPESGPGTSESATPESGPGTSTEPSEGSAPGTSTE |
| | | PSEGSAPGTSESATPESGPGTSTEPSEGSAPGSEPATSGSETPGSPAGSPTST |
| | | EEGSSTPSGATGSPGTPGSGTASSSPGSSTPSGATGSPGTSTEPSEGSAPGTS |
| | | TEPSEGSAPGSEPATSGSETPGSPAGSPTSTEEGSPAGSPTSTEEGTSTEPSE |
| | | GSAPGASASGAPSTGGTSESATPESGPGSPAGSPTSTEEGSPAGSPTSTEEG |
| | | STSSTAESPGPGSTSESPSGTAPGTSPSGESSTAPGTPGSGTASSSPGSSTPSG |
| | | ATGSPGSSPSASTGTGPGSEPATSGSETPGTSESATPESGPGSEPATSGSETP |
| | | GSTSSTAESPGPGSTSSTAESPGPGTSPSGESSTAPGSEPATSGSETPGSEPA |
| | | TSGSETPGTSTEPSEGSAPGSTSSTAESPGPGTSTPESGSASPGSTSESPSGT |
| | | APGTSTEPSEGSAPGTSTEPSEGSAPGTSTEPSEGSAPGSSTPSGATGSPGSS |
| | | PSASTGTGPGASPGTSSTGSPGSEPATSGSETPGTSESATPESGPGSPAGSPT |
| | | STEEGSSTPSGATGSPGSSPSASTGTGPGASPGTSSTGSPGTSESATPESGPG |
| | | TSTEPSEGSAPGTSTEPSEGSAP |
| AM1318 | 77 | GTSTEPSEGSAPGSEPATSGSETPGSPAGSPTSTEEGSTSSTAESPGPGTSTP |
| | | ESGSASPGSTSESPSGTAPGSTSESPSGTAPGTSTPESGSASPGTSTPESGSA |
| | | SPGSEPATSGSETPGTSESATPESGPGSPAGSPTSTEEGTSTEPSEGSAPGTS |
| | | ESATPESGPGTSTEPSEGSAPGTSTEPSEGSAPGSPAGSPTSTEEGTSTEPSE |
| | | GSAPGTSTEPSEGSAPGTSESATPESGPGTSESATPESGPGTSTEPSEGSAPG |
| | | TSTEPSEGSAPGTSESATPESGPGTSTEPSEGSAPGSEPATSGSETPGSPAGS |
| | | PTSTEEGSSTPSGATGSPGTPGSGTASSSPGSSTPSGATGSPGTSTEPSEGSA |
| | | PGTSTEPSEGSAPGSEPATSGSETPGSPAGSPTSTEEGSPAGSPTSTEEGTST |
| | | EPSEGSAPGPEPTGPAPSGGSEPATSGSETPGTSESATPESGPGSPAGSPTST |
| | | EEGTSESATPESGPGSPAGSPTSTEEGSPAGSPTSTEEGTSESATPESGPGSP |
| | | AGSPTSTEEGSPAGSPTSTEEGSTSSTAESPGPGSTSESPSGTAPGTSPSGES |
| | | STAPGSTSESPSGTAPGSTSESPSGTAPGTSPSGESSTAPGTSTEPSEGSAPG |
| | | TSESATPESGPGTSESATPESGPGSEPATSGSETPGTSESATPESGPGTSESA |
| | | TPESGPGTSTEPSEGSAPGTSESATPESGPGTSTEPSEGSAPGTSPSGESSTA |
| | | PGTSPSGESSTAPGTSPSGESSTAPGTSTEPSEGSAPGSPAGSPTSTEEGTST |
| | | EPSEGSAPGSSPSASTGTGPGSSTPSGATGSPGSSTPSGATGSPGSSTPSGAT |
| | | GSPGSSTPSGATGSPGASPGTSSTGSPGASASGAPSTGGTSPSGESSTAPGS |
| | | TSSTAESPGPGTSPSGESSTAPGTSESATPESGPGTSTEPSEGSAPGTSTEPSE |
| | | GSAPGSSPSASTGTGPGSSTPSGATGSPGASPGTSSTGSPGTSTPESGSASPG |
| | | TSPSGESSTAPGTSPSGESSTAPGTSESATPESGPGSEPATSGSETPGTSTEPS |
| | | EGSAPGSTSESPSGTAPGSTSESPSGTAPGTSTPESGSASPGSPAGSPTSTEE |
| | | GTSESATPESGPGTSTEPSEGSAPGSPAGSPTSTEEGTSESATPESGPGSEPA |
| | | TSGSETPGSSTPSGATGSPGASPGTSSTGSPGSSTPSGATGSPGSTSESPSGT |
| | | APGTSPSGESSTAPGSTSSTAESPGPGSSTPSGATGSPGASPGTSSTGSPGTP |
| | | GSGTASSSPGSPAGSPTSTEEGSPAGSPTSTEEGTSTEPSEGSAP |
| BC 864 | 78 | GTSTEPSEPGSAGTSTEPSEPGSAGSEPATSGTEPSGSGASEPTSTEPGSEPA |
| | | TSGTEPSGSEPATSGTEPSGSEPATSGTEPSGSGASEPTSTEPGTSTEPSEPG |
| | | SAGSEPATSGTEPSGTSTEPSEPGSAGSEPATSGTEPSGSEPATSGTEPSGTS |
| | | TEPSEPGSAGTSTEPSEPGSAGSEPATSGTEPSGSEPATSGTEPSGTSEPSTS |
| | | EPGAGSGASEPTSTEPGTSEPSTSEPGAGSEPATSGTEPSGSEPATSGTEPSG |
| | | TSTEPSEPGSAGTSTEPSEPGSAGSGASEPTSTEPGSEPATSGTEPSGSEPAT |
| | | SGTEPSGSEPATSGTEPSGSEPATSGTEPSGTSTEPSEPGSAGSEPATSGTEP |
| | | SGSGASEPTSTEPGTSTEPSEPGSAGSEPATSGTEPSGSGASEPTSTEPGTST |
| | | EPSEPGSAGSGASEPTSTEPGSEPATSGTEPSGSGASEPTSTEPGSEPATSGT |
| | | EPSGSGASEPTSTEPGTSTEPSEPGSAGSEPATSGTEPSGSGASEPTSTEPGT |
| | | STEPSEPGSAGSEPATSGTEPSGTSTEPSEPGSAGSEPATSGTEPSGTSTEPS |
| | | EPGSAGTSTEPSEPGSAGTSTEPSEPGSAGTSTEPSEPGSAGTSTEPSEPGSA |
| | | GTSTEPSEPGSAGTSEPSTSEPGAGSGASEPTSTEPGTSTEPSEPGSAGTSTE |
| | | PSEPGSAGTSTEPSEPGSAGSEPATSGTEPSGSGASEPTSTEPGSEPATSGTE |
| | | PSGSEPATSGTEPSGSEPATSGTEPSGSEPATSGTEPSGTSEPSTSEPGAGSE |
| | | PATSGTEPSGSGASEPTSTEPGTSTEPSEPGSAGSEPATSGTEPSGSGASEPT |
| | | STEPGTSTEPSEPGSA |
| BD864 | 79 | GSETATSGSETAGTSESATSESGAGSTAGSETSTEAGTSESATSESGAGSET |
| | | ATSGSETAGSETATSGSETAGTSTEASEGSASGTSTEASEGSASGTSESATS |
| | | ESGAGSETATSGSETAGTSTEASEGSASGSTAGSETSTEAGTSESATSESGA |
| | | GTSESATSESGAGSETATSGSETAGTSESATSESGAGTSTEASEGSASGSET |
| | | ATSGSETAGSETATSGSETAGTSTEASEGSASGSTAGSETSTEAGTSESATS |
| | | ESGAGTSTEASEGSASGSETATSGSETAGSTAGSETSTEAGSTAGSETSTEA |
| | | GSETATSGSETAGTSESATSESGAGTSESATSESGAGSETATSGSETAGTSE |
| | | SATSESGAGTSESATSESGAGSETATSGSETAGSETATSGSETAGTSTEASE |
| | | GSASGSTAGSETSTEAGSETATSGSETAGTSESATSESGAGSTAGSETSTEA |
| | | GSTAGSETSTEAGSTAGSETSTEAGTSTEASEGSASGSTAGSETSTEAGSTA |
| | | GSETSTEAGTSTEASEGSASGSTAGSETSTEAGSETATSGSETAGTSTEASE |
| | | GSASGTSESATSESGAGSETATSGSETAGTSESATSESGAGTSESATSESGA |
| | | GSETATSGSETAGTSESATSESGAGSETATSGSETAGTSTEASEGSASGTST |
| | | EASEGSASGSTAGSETSTEAGSTAGSETSTEAGSETATSGSETAGTSESATS |
| | | ESGAGTSESATSESGAGSETATSGSETAGSETATSGSETAGSETATSGSETA |
| | | GTSTEASEGSASGTSESATSESGAGSETATSGSETAGSETATSGSETAGTSE |
| | | SATSESGAGTSESATSESGAGSETATSGSETA |

[0171] 4. XTEN Segments

[0172] In one embodiment, the invention provides an isolated GHXTEN fusion protein wherein the cumulative length of the XTEN component is greater than about 100 to about 3000 amino acid residues containing at least one polypeptide sequence segment selected from Tables 3, 8, 9, 10, 11, and 12 and wherein at least about 90%, or at least about 91%, or at least about 92%, or at least about 93%, or at least about 94%, or at least about 95%, or at least about 96%, or at least about 97%, or at least about 98% or more of the remainder of the XTEN sequence by and large contains hydrophilic amino acids and less than about 2% of the remainder of the XTEN consists of hydrophobic or aromatic amino acids, or cysteine. In some embodiments, the XTEN contains multiple segments wherein the segments are identical or different. In another embodiment, the invention provides an isolated GHXTEN fusion protein wherein the cumulative length of the XTEN component is greater than about 100 to about 3000 amino acid residues and comprises at least one sequence segment of at least about 100 to about 923, or at least about 100 to about 875, or at least about 100 to about 576, or at least about 100 to about 288, or at least about 100 to about 144 amino acid residues wherein the sequence segment(s) consists of at least three different types of amino acids and the sum of glycine (G), alanine (A), serine (S), threonine (T), glutamate (E) and proline (P) residues in the sequence segment(s) constitutes at least about 90%, or at least about 91%, or at least about 92%, or at least about 93%, or at least about 94%, or at least about 95%, or at least about 96%, or at least about 97%, or at least about 98%, or at least about 99% of the total amino acid sequence of the sequence segment and at least about 90%, or at least about 91%, or at least about 92%, or at least about 93%, or at least about 94%, or at least about 95%, or at least about 96%, or at least about 97%, or at least about 98% of the remainder of the XTEN sequence(s) consist of hydrophilic amino acids and less than about 2% of the remainder of the XTEN sequence(s) consists of hydrophobic oraromatic amino acids, or cysteine. In another embodiment, the invention provides an isolated GHXTEN fusion protein wherein the cumulative length of the XTEN component is greater than about 100 to about 3000 amino acid residues and comprises at least one sequence segment of at least about 200 to about 923, or at least about 200 to about 875, or at least about 200 to about 576, or at least about 200 to about 288 amino acid residues wherein the sequence segment(s) the sum of glycine (G), alanine (A), serine (S), threonine (T), glutamate (E) and proline (P) residues in the sequence segment(s) constitutes at least about 90%, or at least about 91%, or at least about 92%, or at least about 93%, or at least about 94%, or at least about 95%, or at least about 96%, or at least about 97%, or at least about 98%, or at least about 99% of the total amino acid sequence of the sequence segment and wherein the subsequence score of the segment is less than 12, more preferably less than 10, more preferably less than 9, more preferably less than 8, more preferably less than 7, more preferably less than 6, and most preferably less than 5, and at least about 90%, or at least about 91%, or at least about 92%, or at least about 93%, or at least about 94%, or at least about 95%, or at least about 96%, or at least about 97%, or at least about 98% of the remainder of the XTEN sequence(s) consist of hydrophilic amino acids and less than about 2% of the remainder of the XTEN sequence(s) consists of hydrophobic, aromatic or cysteine amino acids.

[0173] 5. N-Terminal XTEN Expression-Enhancing Sequences

[0174] In some embodiments, the invention provides a short-length XTEN sequence incorporated as the N-terminal portion of the GHXTEN fusion protein. The expression of the fusion protein is enhanced in a host cell transformed with a suitable expression vector comprising an optimized N-terminal leader polynucleotide sequence (that encodes the N-terminal XTEN) incorporated into the polynucleotide encoding the binding fusion protein. It has been discovered, as described in Examples 14-17, that a host cell transformed with such an expression vector comprising an optimized N-terminal leader sequence (NTS) in the binding fusion protein gene results in greatly-enhanced expression of the fusion protein compared to the expression of a corresponding fusion protein from a polynucleotide not comprising the NTS, and obviates the need for incorporation of a non-XTEN leader sequence used to enhance expression. In one embodiment, the invention provides GHXTEN fusion proteins comprising an NTS wherein the expression of the binding fusion protein from the encoding gene in a host cell is enhanced about 50%, or about 75%, or about 100%, or about 150%, or about 200%, or about 400% compared to expression of a GHXTEN fusion protein not comprising the N-terminal XTEN sequence (where the encoding gene lacks the NTS).

[0175] In one embodiment, the N-terminal XTEN polypeptide of the GHXTEN comprises a sequence that exhibits at least about 80%, more preferably at least about 90%, more preferably at least about 91%, more preferably at least about 92%, more preferably at least about 93%, more preferably at least about 94%, more preferably at least about 95%, more preferably at least about 96%, more preferably at least about 97%, more preferably at least about 98%, more preferably at least 99%, or exhibits 100% sequence identity to the amino acid sequence of AE48 or AM48, the respective amino acid sequences of which are as follows:

AE48:

(SEQ ID NO: 80)

MAEPAGSPTSTEEGTPGSGTASSSPGSSTPSGATGSPGASPGTSSTGS
AM48:

(SEQ ID NO: 81)

MAEPAGSPTSTEEGASPGTSSTGSPGSSTPSGATGSPGSSTPSGATGS

[0176] In another embodiment, the short-length N-terminal XTEN is linked to an XTEN of longer length to form the N-terminal region of the GHXTEN fusion protein, wherein the polynucleotide sequence encoding the short-length N-terminal XTEN confers the property of enhanced expression in the host cell, and wherein the long length of the expressed XTEN contributes to the enhanced properties of the XTEN carrier in the fusion protein, as described above. In the foregoing, the short-length XTEN is linked to any of the XTEN disclosed herein (e.g., an XTEN of Table 3) and the resulting XTEN, in turn, is linked to the N-terminal of any of the GH disclosed herein (e.g., a GH of Table 1) as a component of the fusion protein. Alternatively, polynucleotides encoding the short-length XTEN (or its complement) is linked to polynucleotides encoding any of the XTEN (or its complement) disclosed herein and the resulting gene encoding the N-terminal XTEN, in turn, is linked to the 5′ end of polynucleotides encoding any of the GH (or to the 3′ end of its complement) disclosed herein. In some embodiments, the N-terminal XTEN polypeptide with long length exhibits at least about 80%, or at least about 90%, or at least about 91%, or at least about 92%, or at least about 93%, or at least about 94%, or at least about 95%, or at least about 96%, or at least about 97%, or at least about 98%, or at least 99%, or exhibits 100% sequence identity to an amino acid sequence selected from the group consisting of the sequences AE624, AE912, and AM923.

[0177] In any of the foregoing N-terminal XTEN embodiments described above, the N-terminal XTEN can have from about one to about six additional amino acid residues, preferably selected from GESTPA, to accommodate the restriction endonuclease restriction sites that would be employed to join the nucleotides encoding the N-terminal XTEN to the gene encoding the targeting moiety of the fusion protein. The methods for the generation of the N-terminal sequences and incorporation into the fusion proteins of the invention are described more fully in the Examples.

[0178] 6. Net Charge

[0179] In other embodiments, the XTEN polypeptides have an unstructured characteristic imparted by incorporation of amino acid residues with a net charge and/or reducing the proportion of hydrophobic amino acids in the XTEN sequence. The overall net charge and net charge density is controlled by modifying the content of charged amino acids in the XTEN sequences. In some embodiments, the net charge density of the XTEN of the compositions may be above +0.1 or below −0.1 charges/residue. In other embodiments, the net charge of a XTEN can be about 0%, about 1%, about 2%, about 3%, about 4%, about 5%, about 6%, about 7%, about 8%, about 9%, about 10% about 11%, about 12%, about 13%, about 14%, about 15%, about 16%, about 17%, about 18%, about 19%, or about 20% or more.

[0180] Since most tissues and surfaces in a human or animal have a net negative charge, in some embodiments, the XTEN sequences are designed to have a net negative charge to minimize non-specific interactions between the XTEN containing compositions and various surfaces such as blood vessels, healthy tissues, or various receptors. Not to be bound by a particular theory, the XTEN can adopt open conformations due to electrostatic repulsion between individual amino acids of the XTEN polypeptide that individually carry a net negative charge and that are distributed across the sequence of the XTEN polypeptide. Such a distribution of net negative charge in the extended sequence lengths of XTEN can lead to an unstructured conformation that, in turn, can result in an effective increase in hydrodynamic radius. In preferred embodiments, the negative charge is conferred by incorporation of glutamic acid residues. Accordingly, in one embodiment the invention provides XTEN in which the XTEN sequences contain about 8, 10, 15, 20, 25, or even about 30% glutamic acid. Generally, the glutamic residues would be spaced uniformly across the XTEN sequence. In some cases, the XTEN can contain about 10-80, or about 15-60, or about 20-50 glutamic residues residues per 20 kD of XTEN that can result in an XTEN with charged residues that would have very similar pKa, which can increase the charge homogeneity of the product and sharpen its isoelectric point, enhancing the physicochemical properties of the resulting GHXTEN fusion protein for, example, simplifying purification procedures.

[0181] The XTEN of the compositions of the present invention generally have no or a low content of positively charged amino acids. In some embodimentsthe XTEN may have less than about 10% amino acid residues with a positive charge, or less than about 7%, or less than about 5%, or less than about 2%, or less than about 1% amino acid residues with a positive charge. However, the invention contemplates constructs where a limited number of amino acids with a positive charge, such as lysine, are incorporated into XTEN to permit conjugation between the epsilon amine of the lysine and a reactive group on a peptide, a linker bridge, or a reactive group on a drug or small molecule to be conjugated to the XTEN backbone. In one embodiment of the foregoing, the XTEN has between about 1 to about 100 lysine residues, or about 1 to about 70 lysine residues, or about 1 to about 50 lysine residues, or about 1 to about 30 lysine residues, or about 1 to about 20 lysine residues, or about 1 to about 10 lysine residues, or about 1 to about 5 lysine residues, or alternatively only a single lysine residue. Using the foregoing lysine-containing XTEN, fusion proteins are constructed that comprises XTEN, a growth hormone, plus a chemotherapeutic agent useful in the treatment of growth-related diseases or disorders, wherein the maximum number of molecules of the agent incorporated into the XTEN component is determined by the numbers of lysines or other amino acids with reactive side chains (e.g., cysteine) incorporated into the XTEN.

[0182] In some embodiments, the XTEN sequence comprises charged residues separated by other residues such as serine or glycine, which leads to better expression or purification behavior. Based on the net charge, some XTENs have an isoelectric point (pI) of 1.0, 1.5, 2.0, 2.5, 3.0, 3.5, 4.0, 4.5, 5.0, 5.5, 6.0, or even 6.5. In preferred embodiments, the XTEN will have an isoelectric point between 1.5 and 4.5. In these embodiments, the XTEN incorporated into the GHXTEN fusion protein compositions of the present invention carry a net negative charge under physiologic conditions that contribute to the unstructured conformation and reduced binding of the XTEN component to mammalian proteins and tissues.

[0183] As hydrophobic amino acids impart structure to a polypeptide, the invention provides that the content of hydrophobic amino acids in the XTEN will typically be less than 5%, or less than 2%, or less than 1% hydrophobic amino acid content. In one embodiment, the amino acid content of methionine and tryptophan in the XTEN component of a GHXTEN fusion protein is typically less than 5%, or less than 2%, and most preferably less than 1%. In another embodiment, the XTEN will have a sequence that has less than 10% amino acid residues with a positive charge, or less than about 7%, or less that about 5%, or less than about 2% amino acid residues with a positive charge, the sum of methionine and tryptophan residues will be less than 2%, and the sum of asparagine and glutamine residues will be less than 10% of the total XTEN sequence.

[0184] 7. Low Immunogenicity

[0185] In another aspect, the invention provides compositions in which the XTEN sequences have a low degree of immunogenicity or are substantially non-immunogenic. Several factors can contribute to the low immunogenicity of XTEN, e.g., the non-repetitive sequence, the unstructured conformation, the high degree of solubility, the low degree or lack of self-aggregation, the low degree or lack of proteolytic sites within the sequence, and the low degree or lack of epitopes in the XTEN sequence.

[0186] Conformational epitopes are formed by regions of the protein surface that are composed of multiple discontinuous amino acid sequences of the protein antigen. The precise folding of the protein brings these sequences into a well-defined, stable spatial configurations, or epitopes, that can be recognized as “foreign” by the host humoral immune system, resulting in the production of antibodies to the protein or the activation of a cell-mediated immune response. In the latter case, the immune response to a protein in an individual is heavily influenced by T-cell epitope recognition that is a function of the peptide binding specificity of that individual's HLA-DR allotype. Engagement of a MHC Class II peptide complex by a cognate T-cell receptor on the surface of the T-cell, together with the cross-binding of certain other co-receptors such as the CD4 molecule, can induce an activated state within the T-cell. Activation leads to the release of cytokines further activating other lymphocytes such as B cells to produce antibodies or activating T killer cells as a full cellular immune response.

[0187] The ability of a peptide to bind a given MHC Class II molecule for presentation on the surface of an APC (antigen presenting cell) is dependent on a number of factors; most notably its primary sequence. In one embodiment, a lower degree of immunogenicity is achieved by designing XTEN sequences that resist antigen processing in antigen presenting cells, and/or choosing sequences that do not bind MHC receptors well. The invention provides GHXTEN fusion proteins with substantially non-repetitive XTEN polypeptides designed to reduce binding with MHC II receptors, as well as avoiding formation of epitopes for T-cell receptor or antibody binding, resulting in a low degree of immunogenicity. Avoidance of immunogenicity is, in part, a direct result of the conformational flexibility of XTEN sequences; i.e., the lack of secondary structure due to the selection and order of amino acid residues. For example, of particular interest are sequences having a low tendency to adapt compactly folded conformations in aqueous solution or under physiologic conditions that could result in conformational epitopes. The administration of fusion proteins comprising XTEN, using conventional therapeutic practices and dosing, would generally not result in the formation of neutralizing antibodies to the XTEN sequence, and also reduce the immunogenicity of the GH fusion partner in the GHXTEN compositions.

[0188] In one embodiment, the XTEN sequences utilized in the subject fusion proteins can be substantially free of epitopes recognized by human T cells. The elimination of such epitopes for the purpose of generating less immunogenic proteins has been disclosed previously; see for example WO 98/52976, WO 02/079232, and WO 00/3317 which are incorporated by reference herein. Assays for human T cell epitopes have been described (Stickler, M., et al. (2003) J Immunol Methods, 281: 95-108). Of particular interest are peptide sequences that can be oligomerized without generating T cell epitopes or non-human sequences. This is achieved by testing direct repeats of these sequences for the presence of T-cell epitopes and for the occurrence of 6 to 15-mer and, in particular, 9-mer sequences that are not human, and then altering the design of the XTEN sequence to eliminate or disrupt the epitope sequence. In some embodiments, the XTEN sequences are substantially non-immunogenic by the restriction of the numbers of epitopes of the XTEN predicted to bind MHC receptors. With a reduction in the numbers of epitopes capable of binding to MHC receptors, there is a concomitant reduction in the potential for T cell activation as well as T cell helper function, reduced B cell activation or upregulation and reduced antibody production. The low degree of predicted T-cell epitopes can be determined by epitope prediction algorithms such as, e.g., TEPITOPE (Sturniolo, T., et al. (1999) Nat Biotechnol, 17: 555-61), as shown in Example 45. The TEPITOPE score of a given peptide frame within a protein is the log of the K_{d} (dissociation constant, affinity, off-rate) of the binding of that peptide frame to multiple of the most common human MHC alleles, as disclosed in Sturniolo, T. et al. (1999) Nature Biotechnology 17:555). The score ranges over at least 20 logs, from about 10 to about -10 (corresponding to binding constraints of 10e¹⁰K_{d} to 10e⁻¹⁰ K_{d}), and can be reduced by avoiding hydrophobic amino acids that serve as anchor residues during peptide display on MHC, such as M, I, L, V, F. In some embodiments, an XTEN component incorporated into a GHXTEN does not have a predicted T-cell epitope at a TEPITOPE score of about −5 or greater, or −6 or greater, or −7 or greater, or −8 or greater, or at a TEPITOPE score of −9 or greater. As used herein, a score of “−9 or greater” would encompass TEPITOPE scores of 10 to −9, inclusive, but would not encompass a score of −10, as −10 is less than −9.

[0189] In another embodiment, the inventive XTEN sequences, including those incorporated into the subject GHXTEN fusion proteins, are rendered substantially non-immunogenic by the restriction of known proteolytic sites from the sequence of the XTEN, reducing the processing of XTEN into small peptides that can bind to MHC II receptors. In another embodiment, the XTEN sequence is rendered substantially non-immunogenic by the use a sequence that is substantially devoid of secondary structure, conferring resistance to many proteases due to the high entropy of the structure. Accordingly, the reduced TEPITOPE score and elimination of known proteolytic sites from the XTEN render the XTEN compositions, including the XTEN of the GHXTEN fusion protein compositions, substantially unable to be bound by mammalian receptors, including those of the immune system. In one embodiment, an XTEN of a GHXTEN fusion protein can have >100 nM K_{d} binding to a mammalian receptor, or greater than 500 nM K_{d}, or greater than 1 μM K_{d} towards a mammalian cell surface or circulating polypeptide receptor.

[0190] Additionally, the non-repetitive sequence and corresponding lack of epitopes of XTEN limit the ability of B cells to bind to or be activated by XTEN. A repetitive sequence is recognized and can form multivalent contacts with even a few B cells and, as a consequence of the cross-linking of multiple T-cell independent receptors, can stimulate B cell proliferation and antibody production. In contrast, while a XTEN can make contacts with many different B cells over its extended sequence, each individual B cell may only make one or a small number of contacts with an individual XTEN due to the lack of repetitiveness of the sequence. Not being to be bound by any theory, XTENs typically have a much lower tendency to stimulate proliferation of B cells and thus an immune response. In one embodiment, the GHXTEN have reduced immunogenicity as compared to the corresponding GH that is not fused. In one embodiment, the administration of up to three parenteral doses of a GHXTEN to a mammal result in detectable anti-GHXTEN IgG at a serum dilution of 1:100 but not at a dilution of 1:1000. In another embodiment, the administration of up to three parenteral doses of a GHXTEN to a mammal result in detectable anti-GH IgG at a serum dilution of 1:100 but not at a dilution of 1:1000. In another embodiment, the administration of up to three parenteral doses of a GHXTEN to a mammal result in detectable anti-XTEN IgG at a serum dilution of 1:100 but not at a dilution of 1:1000. In the foregoing embodiments, the mammal can be a mouse, a rat, a rabbit, or a cynomolgus monkey.

[0191] An additional feature of XTENs with non-repetitive sequences relative to sequences with a high degree of repetitiveness is non-repetitive XTENs form weaker contacts with antibodies. Antibodies are multivalent molecules. For instance, IgGs have two identical binding sites and IgMs contain 10 identical binding sites. Thus antibodies against repetitive sequences can form multivalent contacts with such repetitive sequences with high avidity, which can affect the potency and/or elimination of such repetitive sequences. In contrast, antibodies against non-repetitive XTENs may yield monovalent interactions, resulting in less likelihood of immune clearance such that the GHXTEN compositions can remain in circulation for an increased period of time.

[0192] 8. Increased Hydrodynamic Radius

[0193] In another aspect, the present invention provides XTEN in which the XTEN polypeptides have a high hydrodynamic radius that confers a corresponding increased Apparent Molecular Weight to the GHXTEN fusion protein incorporating the XTEN. As detailed in Example 37, the linking of XTEN to GH sequences results in GHXTEN compositions that can have increased hydrodynamic radii, increased Apparent Molecular Weight, and increased Apparent Molecular Weight Factor compared to a GH not linked to an XTEN. For example, in therapeutic applications in which prolonged half-life is desired, compositions in which a XTEN with a high hydrodynamic radius is incorporated into a fusion protein comprising one or more GH can effectively enlarge the hydrodynamic radius of the composition beyond the glomerular pore size of approximately 3-5 nm (corresponding to an apparent molecular weight of about 70 kDA) (Caliceti. 2003. Pharmacokinetic and biodistribution properties of poly(ethylene glycol)-protein conjugates. Adv Drug Deliv Rev 55:1261-1277), resulting in reduced renal clearance of circulating proteins. The hydrodynamic radius of a protein is determined by its molecular weight as well as by its structure, including shape or compactness. Not to be bound by a particular theory, the XTEN can adopt open conformations due to electrostatic repulsion between individual charges of the peptide or the inherent flexibility imparted by the particular amino acids in the sequence that lack potential to confer secondary structure. The open, extended and unstructured conformation of the XTEN polypeptide can have a greater proportional hydrodynamic radius compared to polypeptides of a comparable sequence length and/or molecular weight that have secondary and/or tertiary structure, such as typical globular proteins. Methods for determining the hydrodynamic radius are well known in the art, such as by the use of size exclusion chromatography (SEC), as described in U.S. Pat. Nos. 6,406,632 and 7,294,513. As the results of Example 37 demonstrate, the addition of increasing lengths of XTEN results in proportional increases in the parameters of hydrodynamic radius, Apparent Molecular Weight, and Apparent Molecular Weight Factor, permitting the tailoring of GHXTEN to desired characteristic cut-off Apparent Molecular Weights or hydrodynamic radii. Accordingly, in certain embodiments, the GHXTEN fusion protein can be configured with an XTEN such that the fusion protein can have a hydrodynamic radius of at least about 5 nm, or at least about 8 nm, or at least about 10 nm, or 12 nm, or at least about 15 nm. In the foregoing embodiments, the large hydrodynamic radius conferred by the XTEN in an GHXTEN fusion protein can lead to reduced renal clearance of the resulting fusion protein, leading to a corresponding increase in terminal half-life, an increase in mean residence time, and/or a decrease in renal clearance rate.

[0194] In another embodiment, an XTEN of a chosen length and sequence can be selectively incorporated into a GHXTEN to create a fusion protein that have, under physiologic conditions, an Apparent Molecular Weight of at least about 150 kDa, or at least about 300 kDa, or at least about 400 kDa, or at least about 500 kDA, or at least about 600 kDa, or at least about 700 kDA, or at least about 800 kDa, or at least about 900 kDa, or at least about 1000 kDa, or at least about 1200 kDa, or at least about 1500 kDa, or at least about 1800 kDa, or at least about 2000 kDa, or at least about 2300 kDa or more. In another embodiment, an XTEN of a chosen length and sequence can be selectively linked to a GH to result in a GHXTEN fusion protein that has, under physiologic conditions, an Apparent Molecular Weight Factor of at least three, alternatively of at least four, alternatively of at least five, alternatively of at least six, alternatively of at least eight, alternatively of at least 10, alternatively of at least 15, or an Apparent Molecular Weight Factor of at least 20 or greater. In another embodiment, the GHXTEN fusion protein has, under physiologic conditions, an Apparent Molecular Weight Factor that is about 4 to about 20, or is about 6 to about 15, or is about 8 to about 12, or is about 9 to about 10 relative to the actual molecular weight of the fusion protein.

### V). GHXTEN Structural Configurations and Properties

[0195] The GH of the subject compositions are not limited to native, full-length polypeptides, but also include recombinant versions as well as biologically and/or pharmacologically active variants or fragments thereof. For example, it will be appreciated that various amino acid deletions, insertions and substitutions can be made in the GH to create variants without departing from the spirit of the invention with respect to the biological activity or pharmacologic properties of the GH. Examples of conservative substitutions for amino acids in polypeptide sequences are shown in Table 4. However, in embodiments of the GHXTEN in which the sequence identity of the GH is less than 100% compared to a specific sequence disclosed herein, the invention contemplates substitution of any of the other 19 natural L-amino acids for a given amino acid residue of the given GH, which may be at any position within the sequence of the GH, including adjacent amino acid residues. If any one substitution results in an undesirable change in biological activity, then one of the alternative amino acids can be employed and the construct evaluated by the methods described herein, or using any of the techniques and guidelines for conservative and non-conservative mutations set forth, for instance, in U.S. Pat. No. 5,364,934, the contents of which is incorporated by reference in its entirety, or using methods generally known in the art. In addition, variants can include, for instance, polypeptides wherein one or more amino acid residues are added or deleted at the N- or C-terminus of the full-length native amino acid sequence of a GH that retains some if not all of the biological activity of the native peptide.

TABLE 4
Exemplary conservative amino acid substitutions

| Original Residue | Exemplary Substitutions |
|---|---|
| Ala (A) | val; leu; ile |
| Arg (R) | lys; gin; asn |
| Asn (N) | gin; his; Iys; arg |
| Asp (D) | glu |
| Cys (C) | ser |
| Gln (Q) | asn |
| Glu (E) | asp |
| Gly (G) | pro |
| His (H) | asn: gin: Iys: arg |
| xIle (I) | leu; val; met; ala; phe: norleucine |
| Leu (L) | norleucine: ile: val; met; ala: phe |
| Lys (K) | arg: gin: asn |
| Met (M) | leu; phe; ile |
| Phe (F) | leu: val: ile; ala |
| Pro (P) | gly |
| Ser (S) | thr |
| Thr (T) | ser |
| Trp (W) | tyr |
| Tyr (Y) | trp: phe: thr: ser |
| Val (V) | ile; leu; met; phe; ala; norleucine |

[0196] (2) GHXTEN Fusion Protein Configurations

[0197] The invention provides GHXTEN fusion protein compositions with the GH and XTEN components linked in specific N- to C-terminus configurations. In some embodiments, one or more GHs are linked to one or more XTENs, either at the N-terminus or at the C-terminus, with or without a spacer, to form a block copolymer, and the sequential arrangement of the GHs and the XTENs in the GHXTEN fusion protein are the same as the configuration known in the block copolymer chemistry. When there is more than one GH, XTEN, or spacer, each of the GH, the XTEN, or the spacer have the same or different sequences, and the GHs and/or XTENs are linked either continously or alternately (regular or irregular). Thus, in all of the fomulae provided herein, when there is more than one GH, XTEN, or spacer, each of the GH, XTEN, and spacer are the same or different. In some embodiments, the GHXTEN is a monomeric fusion protein with a GH linked to one XTEN polypeptide. In other embodiments, the GHXTEN is a monomeric fusion protein with a GH linked to two or more XTEN polypeptides. In still other embodiments, the GHXTEN is a monomeric fusion protein with two or more GH linked to one XTEN polypeptide. In still other embodiments, the GHXTEN is a monomeric fusion protein with two or more GH linked to two or more XTEN polypeptide. Table 5 provides non-limiting examples of configurations that are encompassed by the GHXTEN fusion proteins of the invention; numerous other variations will be apparent to the ordinarily skilled artisan, including the incorporation the spacer and cleavage sequences disclosed herein or known in the art.

TABLE 5
GHXTEN configurations

| Components* | Configuration** |
|---|---|
| Single GH; Single XTEN | GH-XTEN |
| | XTEN-GH |
| Single GH; Multiple XTEN | XTEN-GH-XTEN |
| | GH-XTEN-XTEN |
| | XTEN-XTEN-GH |
| | XTEN-GH-XTEN-XTEN |
| | XTEN-XTEN-GH-XTEN |
| | XTEN-XTEN-GH-XTEN |
| Multiple GH, Single XTEN | GH-XTEN-GH |
| | XTEN-GH-GH |
| | GH-GH-XTEN |
| | GH-XTEN-GH-GH |
| Multiple GH; Multiple XTEN | GH-XTEN-GH-XTEN |
| | XTEN-GH-XTEN-GH |
| | XTEN-XTEN-GH-XTEN-GH |
| | XTEN-XTEN-GH-GH |
| | GH-XTEN-XTEN-GH |
| | GH-GH-XTEN-XTEN |
| | GH-GH-XTEN-XTEN-GH |
| | GH-XTEN-GH-XTEN-GH |

*Characterized as single for 1 component or multiple for 2 or more of that component
**Reflects N- to C-terminus configuration of the growth factor and XTEN components

[0198] The invention contemplates GHXTEN fusion proteins compositions comprising, but not limited to single or multiple GH selected from Table 1 (or fragments or sequence variants thereof), single or multiple XTEN selected from Table 3 (or sequence variants thereof) that are in a configuration shown in Table 5. Generally, the resulting GHXTEN retains at least a portion of the biological activity of the corresponding GH not linked to the XTEN. In other embodiments, the GH component either becomes biologically active or has an increase in activity upon its release from the XTEN by cleavage of an optional cleavage sequence incorporated within spacer sequences into the GHXTEN, described more fully below.

[0199] In one embodiment of the GHXTEN composition, the invention provides a fusion protein of formula I:

(XTEN)ₓ-GH-(XTEN)_{y} I

wherein independently for each occurrence, GH is a is a growth hormone; x is either 0 or 1 and y is either 0 or 1 wherein x+y≥1; and XTEN is an extended recombinant polypeptide.

[0200] In another embodiment of the GHXTEN composition, the invention provides a fusion protein of formula II:

(XTEN)ₓ(GH)-(S)_{y}-(XTEN)_{y} II

wherein independently for each occurrence, GH is a is a growth hormone a; S is a spacer sequence having between 1 to about 50 amino acid residues that can optionally include a cleavage sequence; x is either 0 or 1 and y is either 0 or 1 wherein x+y≥1; and XTEN is an extended recombinant polypeptide.

[0201] In another embodiment, the invention provides an isolated fusion protein, wherein the fusion protein is of formula III:

(GH)-(S)ₓ-(XTEN)-(S)_{y}-(GH)-(S)_{z}-(XTEN)_{z} III

wherein independently for each occurrence, GH is a is a growth hormone; S is a spacer sequence having between 1 to about 50 amino acid residues that can optionally include a cleavage sequence; x is either 0 or 1; y is either 0 or 1; z is either 0 or 1; and XTEN is an extended recombinant polypeptide.

[0202] In another embodiment, the invention provides an isolated fusion protein, wherein the fusion protein is of formula IV:

(XTEN)ₓ-(S)_{y}-(GH)-(S)_{z}-(XTEN)-(GH) IV

wherein independently for each occurrence, GH is a is a growth hormone; S is a spacer sequence having between 1 to about 50 amino acid residues that can optionally include a cleavage sequence; x is either 0 or 1; y is either 0 or 1; z is either 0 or 1; and XTEN is an extended recombinant polypeptide.

[0203] In another embodiment, the invention provides an isolated fusion growth hormone, wherein the fusion protein is of formula V:

(GH)ₓ-(S)ₓ-(GH)-(S)_{y}-(XTEN) V

wherein independently for each occurrence, GH is a is a growth hormone; S is a spacer sequence having between 1 to about 50 amino acid residues that can optionally include a cleavage sequence; x is either 0 or 1; y is either 0 or 1; and XTEN is an extended recombinant polypeptide.

[0204] In another embodiment, the invention provides an isolated fusion protein, wherein the fusion protein is of formula VI:

(XTEN)-(S)ₓ-(GH)-(S)_{y}-(GH) VI

wherein independently for each occurrence, GH is a is a growth hormone; S is a spacer sequence having between 1 to about 50 amino acid residues that can optionally include a cleavage sequence; x is either 0 or 1; y is either 0 or 1; and XTEN is an extended recombinant polypeptide.

[0205] In another embodiment, the invention provides an isolated fusion protein, wherein the fusion protein is of formula VII:

(XTEN)-(S)ₓ-(GH)-(S)_{y}-(GH)-(XTEN) VII

wherein independently for each occurrence, GH is a is a growth hormone; S is a spacer sequence having between 1 to about 50 amino acid residues that can optionally include a cleavage sequence; x is either 0 or 1; y is either 0 or 1; and XTEN is an extended recombinant polypeptide.

[0206] In another embodiment, the invention provides an isolated fusion protein, wherein the fusion protein is of formula VIII:

((S)ₘ-(GH)ₓ-(S)ₙ-(XTEN)_{y}-(S)ₒ)ₜ VIII

wherein t is an integer that is greater than 0 (1, 2, 3, etc.); independently each of m, n, o, x, and y is an integer (0, 1, 2, 3, etc.), GH is a is a growth hormone; S is an spacer, optionally comprising a cleavage site; and XTEN is an extended recombinant polypeptide, with the proviso that: (1) x+y>1, (2) when t=1, x>0 and y>0, (3) when there is more than one GH, S, or XTEN, each GH, XTEN, or S are the same or are independently different; and (4) when t>1, each m, n, o, x, or y within each subunit are the same or are independently different.

[0207] In some embodiments, administration of a therapeutically effective amount of a fusion protein of an embodiment of formulas I-VIII to a subject in need thereof results in a gain in time of at least two-fold, or at least three-fold, or at least four-fold, or at least five-fold, or at least 10-fold, or at least 20-fold, or at least 40-fold, or at least 100-fold or more spent within a therapeutic window for the fusion protein compared to the corresponding GH not linked to the XTEN of and administered at a comparable amount administered to a subject. In other embodiments, administration of a therapeutically effective dose of a fusion protein of an embodiment of formulas I-VIII to a subject in need thereof can result in a gain in time between consecutive doses necessary to maintain a therapeutically effective dose regimen of at least 48 h, or at least 72 h, or at least about 96 h, or at least about 120 h, or at least about 7 days, or at least about 14 days, or at least about 21 days between consecutive doses compared to a GH not linked to XTEN and administered at a comparable dose.

[0208] Any spacer sequence group is optional in the fusion proteins encompassed by the invention. The spacer is provided to enhance expression of the fusion protein from a host cell or to decrease steric hindrance such that the GH component may assume its desired tertiary structure and/or interact appropriately with its target receptor. For spacers and methods of identifying desirable spacers, see, for example, George, et al. (2003) Protein Engineering 15:871-879, specifically incorporated by reference herein. In one embodiment, the spacer comprises one or more peptide sequences that are between 1-50 amino acid residues in length, or about 1-25 residues, or about 1-10 residues in length. Spacer sequences, exclusive of cleavage sites, can comprise any of the 20 natural L amino acids, and will preferably comprise hydrophilic amino acids that are sterically unhindered that can include, but not be limited to, glycine (G), alanine (A), serine (S), threonine (T), glutamate (E) and proline (P). In some cases, the spacer can be polyglycines or polyalanines, or is predominately a mixture of combinations of glycine and alanine residues. The spacer polypeptide exclusive of a cleavage sequence is largely to substantially devoid of secondary structure; e.g., less than about 10%, or less than about 5% as determined by the Chou-Fasman and/or GOR algorithms. In one embodiment, one or both spacer sequences in a GHXTEN fusion protein composition each further contains a cleavage sequence, which are identical or different, wherein the cleavage sequence may be acted on by a protease to release the GH from the fusion protein.

[0209] In some embodiments, the incorporation of the cleavage sequence into the GHXTEN is designed to permit release of a GH that becomes active or more active upon its release from the XTEN. The cleavage sequences are located sufficiently close to the GH sequences, generally within 18, or within 12, or within 6, or within 2 amino acids of the GH sequence terminus, such that any remaining residues attached to the GH after cleavage do not appreciably interfere with the activity (e.g., such as binding to a receptor) of the GH, yet provide sufficient access to the protease to be able to effect cleavage of the cleavage sequence. In some embodiments, the cleavage site is a sequence that can be cleaved by a protease endogenous to the mammalian subject such that the GHXTEN can be cleaved after administration to a subject. In such cases, the GHXTEN can serve as a prodrug or a circulating depot for the GH. Examples of cleavage sites contemplated by the invention include, but are not limited to, a polypeptide sequence cleavable by a mammalian endogenous protease selected from FXIa, FXIIa, kallikrein, FVIIa, FIXa, FXa, FIIa (thrombin), Elastase-2, granzyme B, MMP-12, MMP-13, MMP-17 or MMP-20, or by non-mammalian proteases such as TEV, enterokinase, PreScission™ protease (rhinovirus 3C protease), and sortase A. Sequences known to be cleaved by the foregoing proteases and others are known in the art. Exemplary cleavage sequences and cut sites within the sequences are presented in Table 6, as well as sequence variants thereof. For example, thrombin (activated clotting factor II) acts on the sequence LTPRSLLV (SEQ ID NO: 82) [Rawlings N. D., et al. (2008) Nucleic Acids Res., 36: D320], which would be cut after the arginine at position 4 in the sequence. Active FIIa is produced by cleavage of FIT by FXa in the presence of phospholipids and calcium and is down stream from factor IX in the coagulation pathway. Once activated its natural role in coagulation is to cleave fibrinogen, which then in turn, begins clot formation. FIIa activity is tightly controlled and only occurs when coagulation is necessary for proper hemostasis. However, as coagulation is an on-going process in mammals, by incorporation of the LTPRSLLV sequence (SEQ ID NO: 83) into the GHXTEN between the GH and the XTEN, the XTEN domain would be removed from the adjoining GH concurrent with activation of either the extrinsic or intrinsic coagulation pathways when coagulation is required physiologically, thereby releasing GH over time. Similarly, incorporation of other sequences into GHXTEN that are acted upon by endogenous proteases would provide for sustained release of GH that, in certain embodiments, provide a higher degree of activity for the GH from the “prodrug” form of the GHXTEN.

[0210] In some embodiments, only the two or three amino acids flanking both sides of the cut site (four to six amino acids total) are incorporated into the cleavage sequence. In other embodiments, the known cleavage sequence have one or more deletions or insertions or one or two or three amino acid substitutions for any one or two or three amino acids in the known sequence, wherein the deletions, insertions or substitutions result in reduced or enhanced susceptibility but not an absence of susceptibility to the protease, resulting in an ability to tailor the rate of release of the GH from the XTEN. Exemplary substitutions are shown in Table 6.

TABLE 6
Protease Cleavage Sequences

| | Exemplary | SEQ | | SEQ |
|---|---|---|---|---|
| Protease Acting | Cleavage | ID | | ID |
| Upon Sequence | Sequence | NO: | Minimal Cut Site* | NO: |
| FXIa | KLTR↓VVGG | 84 | KD/FL/T/R↓VA/VE/GT/GV | |
| FXIIa | TMTR↓IVGG | 85 | NA | |
| Kallikrein | SPFR↓STGG | 86 | -/-/FL/RY↓SR/RT/-/- | |
| FVIIa | LQVR↓IVGG | 87 | NA | |
| FIXa | PLGR,↓IVGG | 88 | -/-/G/R↓-/-/-/- | |
| FXa | IEGR↓TVGG | 89 | IA/E/GFP/R↓STI/VFS/-/G | |
| FIIa (thrombin) | LTPR↓SLLV | 90 | -/-/PLA/R↓SAG/-/-/- | |
| Elastase-2 | LGPV↓SGVP | 91 | -/-/-/VIAT↓-/-/-/- | |
| Granzyme-B | VAGD↓SLEE | 92 | V/-/-/D↓-/-/-/- | |
| MMP-12 | GPAG↓LGGA | 93 | G/PA/-/G↓L/-/G/- | 94 |
| MMP-13 | GPAG↓LRGA | 95 | G/P/-/G↓L/-/GA/- | 96 |
| MMP-17 | APLG↓LRLR | 97 | -/PS/-/-↓LQ/-/LT/- | |
| MMP-20 | PALP↓LVAQ | 98 | NA | |
| TEV | ENLYFQ↓G | 99 | ENLYFQ↓G/S | 100 |
| Enterokinase | DDDK↓IVGG | 101 | DDDK↓IVGG | 102 |
| Protease 3C | LEVLFQ↓GP | 103 | LEVLFQ↓GP | 104 |
| (PreScission ™) | | | | |
| Sortase A | LPKT↓GSES | 105 | L/P/KEAD/T↓G/-/EKS/S | 106 |

↓indicates cleavage site
NA: not applicable
*the listing of multiple amino acids before, between, or after a slash indicate alternative amino acids that can be substituted at the position; “-” indicates that any amino acid may be substituted for the corresponding amino acid indicated in the middle column

[0211] In one embodiment, a GH incorporated into a GHXTEN fusion protein have a sequence that exhibits at least about 80% sequence identity to a sequence from Table 1, alternatively at least about 81%, or about 82%, or about 83%, or about 84%, or about 85%, or about 86%, or about 87%, or about 88%, or about 89%, or about 90%, or about 91%, or about 92%, or about 93%, or about 94%, or about 95%, or about 96%, or about 97%, or about 98%, or about 99%, or about 100% sequence identity as compared with a sequence from Table 1. The GH of the foregoing embodiment can be evaluated for activity using assays or measured or determined parameters as described herein, and those sequences that retain at least about 40%, or about 50%, or about 55%, or about 60%, or about 70%, or about 80%, or about 90%, or about 95% or more activity compared to the corresponding native GH sequence would be considered suitable for inclusion in the subject GHXTEN. The GH found to retain a suitable level of activity can be linked to one or more XTEN polypeptides described hereinabove. In one embodiment, a GH found to retain a suitable level of activity can be linked to one or more XTEN polypeptides having at least about 80% sequence identity to a sequence from Table 3, alternatively at least about 81%, 82%, 83%, 84%, 85%, 86%, 87%, 88%, 89%, 90%, 91%, 92%, 93%, 94%, 95%, 96%, 97%, 98%, 99%, or about 100% sequence identity as compared with a sequence of Table 3, resulting in a chimeric fusion protein.

[0212] Non-limiting examples of sequences of fusion proteins containing a single GH linked to a single XTEN are presented in Table 35. In one embodiment, a GHXTEN composition would comprise a fusion protein having at least about 80% sequence identity to a GHXTEN from Table 35, alternatively at least about 81%, 82%, 83%, 84%, 85%, 86%, 87%, 88%, 89%, 90%, 91%, 92%, 93%, 94%, 95%, 96%, 97%, 98%, 99%, or about 100% sequence identity as compared with a GHXTEN from Table 35. Non-limiting examples of sequences of fusion proteins containing two molecules of XTEN linked to one or more GH are presented in Table 36, but the invention also contemplates substitution of other GH with sequences exhibiting at least about 90% sequence identity to a sequence selected from Table 1 linked to one or two XTEN, which may be the same or different, exhibiting at least about 90% sequence identity selected from Table 3. In the foregoing fusion proteins hereinabove described in this paragraph, the GHXTEN fusion protein can further comprise a cleavage sequence from Table 6; the cleavage sequence being located between the GH and the XTEN or between adjacent GH (if more than one GH is included in the GHXTEN). In some cases, the GHXTEN comprising the cleavage sequences will also have one or more spacer sequence amino acids between the GH and the cleavage sequence or the XTEN and the cleavage sequence to facilitate access of the protease; the spacer amino acids comprising any natural amino acid, including glycine and alanine as preferred amino acids. Non-limiting examples of GHXTEN comprising GH, XTEN, cleavage sequence(s) and spacer amino acids are presented in Table 37. However, the invention also contemplates substitution of any of the GH sequences of Table 1 for a GH sequence of Table 37, substitution of any XTEN sequence of Table 3 for an XTEN sequence of Table 37, and substitution of any cleavage sequence of Table 6 for a cleavage sequence of Table 37.

[0213] (3) Pharmacokinetic Properties of GHXTEN

[0214] The invention provides GHXTEN fusion proteins with enhanced pharmacokinetics compared to the GH not linked to XTEN that, when used at the dose determined for the composition by the methods described herein, can achieve a circulating concentration resulting in a pharmacologic effect, yet stay within the safety range for biologically active component of the composition for an extended period of time compared to a comparable dose of the GH not linked to XTEN. In such cases, the GHXTEN remains within the therapeutic window for the fusion protein composition for the extended period of time. As used herein, a “comparable dose” means a dose with an equivalent moles/kg for the active GH pharmacophore that is administered to a subject in a comparable fashion. It will be understood in the art that a “comparable dosage” of GHXTEN fusion protein would represent a greater weight of agent but would have essentially the same mole-equivalents of GH in the dose of the fusion protein and/or would have the same approximate molar concentration relative to the GH.

[0215] The pharmacokinetic properties of a GH that can be enhanced by linking a given XTEN to the GH include terminal half-life, area under the curve (AUC), Cₘₐₓ volume of distribution, and bioavailability providing enhanced utility in the treatment of growth hormone-related disorders, diseases and related conditions. The GH of the GHXTEN compositions can be a sequence that exhibits at least about 80% sequence identity, or alternatively 81%, 82%, 83%, 84%, 85%, 86%, 87%, 88%, 89%, 90%, 91%, 92%, 93%, 94%, 95%, 96%, 97%, 98%, 99%, or 100% sequence identity to a protein sequence selected from Table 1, linked to one or more XTEN that exhibit at least about 80% sequence identity, or alternatively 81%, 82%, 83%, 84%, 85%, 86%, 87%, 88%, 89%, 90%, 91%, 92%, 93%, 94%, 95%, 96%, 97%, 98%, 99%, or 100% sequence identity to a protein sequence selected from Table 3.

[0216] As described more fully in the Examples pertaining to pharmacokinetic characteristics of fusion proteins comprising XTEN, it was surprisingly discovered that increasing the length of the XTEN sequence confers a disproportionate increase in the terminal half-life of a fusion protein comprising the XTEN. Accordingly, the invention provides GHXTEN fusion proteins comprising XTEN wherein the XTEN is selected to provide a targeted half-life for the GHXTEN composition administered to a subject. In some embodiments, the invention provides monomeric fusion proteins comprising XTEN wherein the XTEN is selected to confer an increase in the terminal half-life for the GHXTEN administered to a subject, compared to the corresponding GH not linked to the fusion protein and administered at a comparable dose, of at least about two-fold longer, or at least about three-fold, or at least about four-fold, or at least about five-fold, or at least about six-fold, or at least about seven-fold, or at least about eight-fold, or at least about nine-fold, or at least about ten-fold, or at least about 15-fold, or at least a 20-fold, or at least a 40-fold, or at least a 80-fold, or at least a 100-fold or greater an increase in terminal half-life compared to the GH not linked to the fusion protein. Exogenously administered human growth hormone has been reported to have a terminal half-life in humans of less than 15 minutes (Hindmarch, P.C., et al., Clinical Endocrinology (2008) 30(4): 443-450), whereas various GHXTEN compositions disclosed herein that have been experimentally administered to various animals species, as described in the Examples, have resulted in terminal half-life values of several hours. Similarly, the GHXTEN fusion proteins can have an increase in AUC of at least about 50%, or at least about 60%, or at least about 70%, or at least about 80%, or at least about 90%, or at least about a 100%, or at least about 150%, or at least about 200%, or at least about 300%, or at least about 500%, or at least about 1000%, or at least about a 2000% increase in AUC compared to the corresponding GH not linked to the fusion protein and administered to a subject at a comparable dose. The pharmacokinetic parameters of a GHXTEN can be determined by standard methods involving dosing, the taking of blood samples at times intervals, and the assaying of the protein using ELISA, HPLC, radioassay, or other methods known in the art or as described herein, followed by standard calculations of the data to derive the half-life and other PK parameters.

[0217] The invention further provides GHXTEN comprising a first and a second GH molecule, optionally separated by a spacer sequence that may further comprise a cleavage sequence, or separated by a second XTEN sequence. In one embodiment, the GH has less activity when linked to the fusion protein compared to a corresponding GH not linked to the fusion protein. In such case, as illustrated in FIG. 38, the GHXTEN is designed such that upon administration to a subject, the GH component is gradually released by cleavage of the cleavage sequence(s), whereupon it regains activity or the ability to bind to its target receptor or ligand. Accordingly, the GHXTEN of the foregoing serves as a prodrug or a circulating depot, resulting in a longer terminal half-life compared to GH not linked to the fusion protein.

[0218] (4) Pharmacology and Pharmaceutical Properties of GHXTEN

[0219] The present invention provides GHXTEN compositions comprising GH covalently linked to XTEN that can have enhanced properties compared to GH not linked to XTEN, as well as methods to enhance the therapeutic and/or biologic activity or effect of the respective two GH components of the compositions. In addition, the invention provides GHXTEN compositions with enhanced properties compared to those art-known fusion proteins containing immunoglobulin polypeptide partners, polypeptides of shorter length and/or polypeptide partners with repetitive sequences. In addition, GHXTEN fusion proteins provide significant advantages over chemical conjugates, such as pegylated constructs, notably the fact that recombinant GHXTEN fusion proteins can be made in bacterial cell expression systems, which can reduce time and cost at both the research and development and manufacturing stages of a product, as well as result in a more homogeneous, defined product with less toxicity for both the product and metabolites of the GHXTEN compared to pegylated conjugates.

[0220] As therapeutic agents, the GHXTEN possesses a number of advantages over therapeutics not comprising XTEN including one or more of the following non-limiting exemplary enhance properties; increased solubility, increased thermal stability, reduced immunogenicity, increased apparent molecular weight, reduced renal clearance, reduced proteolysis, reduced metabolism, enhanced therapeutic efficiency, a lower effective therapeutic dose, increased bioavailability, increased time between dosages capable of maintain blood levels within the therapeutic window for the GH, a “tailored” rate of absorption, enhanced lyophilization stability, enhanced serum/plasma stability, increased terminal half-life, increased solubility in blood stream, decreased binding by neutralizing antibodies, decreased receptor-mediated clearance, reduced side effects, retention of receptor/ligand binding affinity or receptor/ligand activation, stability to degradation, stability to freeze-thaw, stability to proteases, stability to ubiquitination, ease of administration, compatibility with other pharmaceutical excipients or carriers, persistence in the subject, increased stability in storage (e.g., increased shelf-life), reduced toxicity in an organism or environment and the like. The net effect of the enhanced properties is that the GHXTEN results in enhanced therapeutic and/or biologic effect or improved patient compliance when administered to a subject with a growth hormone-related disease or disorder.

[0221] Specific assays and methods for measuring the physical and structural properties of expressed proteins are known in the art, including methods for determining properties such as protein aggregation, solubility, secondary and tertiary structure, melting properties, contamination and water content, etc. Such methods include analytical centrifugation, EPR, HPLC-ion exchange, HPLC-size exclusion, HPLC-reverse phase, light scattering, capillary electrophoresis, circular dichroism, differential scanning calorimetry, fluorescence, HPLC-ion exchange, HPLC-size exclusion, IR, NMR, Raman spectroscopy, refractometry, and UV/Visible spectroscopy. Additional methods are disclosed in Arnau et al, Prot Expr and Purif (2006) 48, 1-13. Application of these methods to the invention would be within the grasp of a person skilled in the art.

[0222] In a particular feature of the invention, XTEN as a fusion partner increases the solubility of the GH payload, particularly in the expression of GH, which is typically expressed as insoluble inclusion bodies in transformed host cells, such as E. coli (see, e.g., Singh, S. M., et al. (2005) J Biosci Bioeng, 99: 303; Patra, A. K., et al. (2000) Protein Expr Purif, 18: 182). Accordingly, where enhancement of the pharmaceutical or physicochemical properties of the GH is desirable, such as the degree of aqueous solubility or stability, the length and/or the motif family composition of the first and the second XTEN sequences of the first and the second fusion protein may each be selected to confer a different degree of solubility and/or stability on the respective fusion proteins such that the overall pharmaceutical properties of the GHXTEN composition are enhanced. The GHXTEN fusion proteins can be constructed and assayed, using methods described herein, to confirm the physicochemical properties and the XTEN adjusted, as needed, to result in the desired properties. In one embodiment, the XTEN sequence of the GHXTEN is selected such that the fusion protein has an aqueous solubility that is within at least about 25% greater compared to a GH not linked to the fusion protein, or at least about 30%, or at least about 40%, or at least about 50%, or at least about 75%, or at least about 100%, or at least about 200%, or at least about 300%, or at least about 400%, or at least about 500%, or at least about 1000% greater than the corresponding GH not linked to the fusion protein.

[0223] The invention provides methods to produce and recover expressed GHXTEN from a host cell with enhanced solubility and ease of recovery compared to GH not linked to XTEN. In some embodiments, the method includes the steps of transforming a prokaryotic host cell (e. g, E. coli) with a polynucleotide encoding a GHXTEN with one or more XTEN components of cumulative sequence length greater than about 800, or greater than about 900, or greater than about 1000, or greater than about 1100 amino acid residues, expressing the GHXTEN fusion protein in the host cell, lysing the host cell to recover cytoplasmic contents, and acidifying the host cell cytoplasmic contents wherein the GH can remain in soluble form while the majority of host cell proteins are precipitated to insoluble form. In one embodiment of the foregoing, the post-expression crude host cell lysates can be acidified to a pH of less than about 5.0, or to a pH of less than about 4.7, or to a pH of less than about 4.5, or to a pH of less than about 4.2 and greater than about 50%, or about 60%, or about 70%, or about 80% or more of the expressed GH can be recovered in soluble form. In a feature of the foregoing embodiment, enriched GHXTEN can be separated from precipitated from host cell protein contaminants by centrifugation of the acidified lysate, a reflection of the increased solubility imparted to the GH by fusion to the XTEN carrier. In the embodiments hereinabove described in this paragraph, the XTEN of the GHXTEN fusion proteins can have at least about 80% sequence identity, or about 90%, or about 91%, or about 92%, or about 93%, or about 94%, or about 95%, or about 96%, or about 97%, or about 98%, or about 99%, to about 100% sequence identity to one or more XTEN selected from Table 3 and the GH can have at least about 80% sequence identity, or about 90%, or about 91%, or about 92%, or about 93%, or about 94%, or about 95%, or about 96%, or about 97%, or about 98%, or about 99%, or 100% sequence identity to a GH selected from Table 1 and the GHXTEN components can be in an N- to C-teriminus configuration selected from Table 5.

[0224] In one embodiment, the invention provides GHXTEN compositions and methods to produce the compositions that can maintain the GH component within a therapeutic window for a greater period of time compared to comparable dosages of the corresponding GH not linked to XTEN. It will be understood in the art that a “comparable dosage” of GHXTEN fusion protein would represent a greater weight of agent but would have the same approximate mole-equivalents of GH in the dose of the fusion protein and/or would have the same approximate molar concentration relative to the GH. The method to produce the compositions that can maintain the GH component within a therapeutic window includes the steps of selecting the XTEN appropriate for conjugation to a GH to provide the desired pharmacokinetic properties in view of a given dose and dose regiment, followed by assays to verify the pharmacokinetic properties, the activity of the GHXTEN fusion protein, and the safey of the administered composition. By the methods, GHXTEN can be produced that enables increased efficacy of the administered composition by maintaining the circulating concentrations of the GH within the therapeutic window for an enhanced period of time. As used herein, “therapeutic window” means that the amount of drug or biologic as a blood or plasma concentration range, which provides efficacy or a desired pharmacologic effect over time for the disease or condition without unacceptable toxicity, i.e. the range of the circulating blood concentrations between the minimal amount to achieve any positive therapeutic effect and the maximum amount which results in a response that is the response immediately before toxicity to the subject (at a higher dose or concentration). Additionally, therapeutic window generally encompasses an aspect of time; the maximum and minimum concentration that results in a desired pharmacologic effect over time that does not result in unacceptable toxicity or adverse events. A dosed composition that stays within the therapeutic window for the subject could also be said to be within the “safety range.”

[0225] The characteristics of GHXTEN compositions of the invention, including functional characteristics or biologic and pharmacologic activity and parameters that result, are determined by any suitable screening assay known in the art for measuring the desired characteristic. The invention provides methods to assay the GHXTEN fusion proteins of differing composition or configuration in order to provide GHXTEN with the desired degree of biologic and/or therapeutic activity, as well as safety profile. Specific in vivo and ex vivo biological assays are used to assess the activity of each configured GHXTEN and/or GH component to be incorporated into GHXTEN, including but not limited to the assays of the Examples, those assays of Table 34, as well as the following assays or other such assays known in the art for assaying the properties and effects of GH. Assays can be conducted that allow determination of binding characteristics of the GHXTEN for GH receptors or a ligand, including binding constant (K_{d}), EC₅₀ values, as well as their half-life of dissociation of the ligand-receptor complex (T_{1/2}). Binding affinity can be measured, for example, by a competition-type binding assay that detects changes in the ability to specifically bind to a receptor or ligand (see, e.g., Examples). Additionally, techniques such as flow cytometry or surface plasmon resonance can be used to detect binding events. The assays may comprise soluble receptor molecules, or may determine the binding to cell-expressed receptors. Such assays may include cell-based assays, including assays for proliferation, cell death, apoptosis and cell migration. Other possible assays may determine receptor binding of expressed polypeptides, wherein the assay may comprise soluble receptor molecules, or may determine the binding to cell-expressed receptors. The binding affinity of a GHXTEN for the target receptors or ligands of the corresponding GH can be assayed using binding or competitive binding assays, such as Biacore assays with chip-bound receptors or binding proteins or ELISA assays, as described in U.S. Pat. No. 5,534,617, assays described in the Examples herein, radio-receptor assays, or other assays known in the art. In addition, GH sequence variants (assayed as single components or as GHXTEN fusion proteins) can be compared to the native GH using a competitive ELISA binding assay to determine whether they have the same binding specificity and affinity as the native GH, or some fraction thereof such that they are suitable for inclusion in GHXTEN. Functional assays can include the increase of IGF-1 secretion and/or generation within target cells as a result of exposure to GHXTEN, and/or the resulting stimulatory effects of IGF-1 on osteoblast and chondrocyte activity to promote bone growth; all are suitable paramaters to assess the activity of GH for inclusion in the GHXTEN fusion protein or the resulting GHXTEN. In addition, human growth hormone (hGH) is known to play a role in somatic growth through its effects on the metabolism of proteins, carbohydrates and lipids, as well as the the stimulation of the production of blood cells in vitro (Derfalvi et al., 1998; Merchav et al; 1988), to increase numbers of erythrocytes and hemoglobin content in blood (Valerio et al., 1997; Vihervuori et al., 1996), as wells as the enhancement of proliferation of and Ig production in plasma cell lines (Kimata and Yoshida, 1994), the stimulation of CD8⁺ cell counts and, to a lesser extent CD4⁺ cell counts (Geffner, 1997). Parameters that can be measured chronically include velocity of growth, physical maturation, and comparative bone rate of growth. All of the foregoing can be used to assess the activity of GH components to be incorporated into GHXTEN and the resulting GHXTEN.

[0226] Dose optimization is important for all drugs, especially for those with a narrow therapeutic window. For example, a standardized single dose of GH for all patients presenting with a diverse symptoms or anbnormal clinical parameters may not always be effective. A consideration of these factors is well within the purview of the ordinarily skilled clinician for the purpose of determining the therapeutically or pharmacologically effective amount of the GHXTEN, versus that amount that would result in unacceptable toxicity and place it outside of the safety range, or insufficient potency such that clinical improvement is not achieved.

[0227] In many cases, the therapeutic window for GH in subjects of different ages or degree of disease have been established and are available in published literature or are stated on the drug label for approved products containing the GH. In other cases, the therapeutic window can be established for new compositions, including those GHXTEN of the disclosure. The methods for establishing the therapeutic window for a given composition are known to those of skill in the art (see, e.g., Goodman & Gilman's The Pharmacological Basis of Therapeutics, 11^{th} Edition, McGraw-Hill (2005)). For example, by using dose-escalation studies in subjects with the target disease or disorder to determine efficacy or a desirable pharmacologic effect, appearance of adverse events, and determination of circulating blood levels, the therapeutic window for a given subject or population of subjects can be determined for a given drug or biologic, or combinations of biologics or drugs. The dose escalation studies can evaluate the activity of a GHXTEN through metabolic studies in a subject or group of subjects that monitor physiological or biochemical parameters, as known in the art or as described herein for one or more parameters associated with the metabolic disease or disorder, or clinical parameters associated with a beneficial outcome for the particular indication, together with observations and/or measured parameters to determine the no effect dose, adverse events, maximum tolerated dose and the like, together with measurement of pharmacokinetic parameters that establish the determined or derived circulating blood levels. The results can then be correlated with the dose administered and the blood concentrations of the therapeutic that are coincident with the foregoing determined parameters or effect levels. By these methods, a range of doses and blood concentrations can be correlated to the minimum effective dose as well as the maximum dose and blood concentration at which a desired effect occurs and above which toxicity occurs, thereby establishing the therapeutic window for the dosed therapeutic. Blood concentrations of the fusion protein (or as measured by the GH component) above the maximum would be considered outside the therapeutic window or safety range. Thus, by the foregoing methods, a Cₘᵢₙ blood level would be established, below which the GHXTEN fusion protein would not have the desired pharmacologic effect, and a Cₘₐₓ blood level would be established that would represent the highest circulating concentration before reaching a concentration that would elicit unacceptable side effects, toxicity or adverse events, placing it outside the safety range for the GHXTEN. With such concentrations established, the frequency of dosing and the dosage can be further refined by measurement of the Cₘₐₓ and Cₘᵢₙ to provide the appropriate dose and dose frequency to keep the fusion protein(s) within the therapeutic window. One of skill in the art can, by the means disclosed herein or by other methods known in the art, confirm that the administered GHXTEN remains in the therapeutic window for the desired interval or requires adjustment in dose or length or sequence of XTEN. Further, the determination of the appropriate dose and dose frequency to keep the GHXTEN within the therapeutic window establishes the therapeutically effective dose regimen; the schedule for administration of multiple consecutive doses using a therapeutically effective dose of the fusion protein to a subject in need thereof resulting in consecutive Cₘₐₓ peaks and/or Cₘᵢₙ troughs that remain within the therapeutic window and results in an improvement in at least one measured parameter relevant for the target disease, disorder or condition. In some cases, the GHXTEN administered at an appropriate dose to a subject results in blood concentrations of the GHXTEN fusion protein that remains within the therapeutic window for a period at least about two-fold longer compared to the corresponding GH not linked to XTEN and administered at a comparable dose; alternatively at least about three-fold longer; alternatively at least about four-fold longer; alternatively at least about five-fold longer; alternatively at least about six-fold longer; alternatively at least about seven-fold longer; alternatively at least about eight-fold longer; alternatively at least about nine-fold longer or at least about ten-fold longer or greater compared to the corresponding GH not linked to XTEN and administered at a comparable dose. As used herein, an “appropriate dose” means a dose of a drug or biologic that, when administered to a subject, would result in a desirable therapeutic or pharmacologic effect and a blood concentration within the therapeutic window.

[0228] In one embodiment, the GHXTEN administered at a therapeutically effective dose regimen results in a gain in time of at least about three-fold longer; alternatively at least about four-fold longer; alternatively at least about five-fold longer; alternatively at least about six-fold longer; alternatively at least about seven-fold longer; alternatively at least about eight-fold longer; alternatively at least about nine-fold longer or at least about ten-fold longer between at least two consecutive Cₘₐₓ peaks and/or Cₘᵢₙ troughs for blood levels of the fusion protein compared to the corresponding biologically active protein of the fusion protein not linked to the fusion protein and administered at a comparable dose regimen to a subject. In another embodiment, the GHXTEN administered at a therapeutically effective dose regimen results in a comparable improvement in one, or two, or three or more measured parameter using less frequent dosing or a lower total dosage in moles of the fusion protein of the pharmaceutical composition compared to the corresponding biologically active protein component(s) not linked to the fusion protein and administered to a subject using a therapeutically effective dose regimen for the GH. The measured parameters include any of the clinical, biochemical, or physiological parameters disclosed herein, or others known in the art for assessing subjects with growth hormone-related disorders.

[0229] The invention provides isolated GHXTEN in which the binding affinity for GH target receptors or ligands by the GHXTEN can be at least about 10%, or at least about 20%, or at least about 30%, or at least about 40%, or at least about 50%, or at least about 60%, or at least about 70%, or at least about 80%, or at least about 90%, or at least about 95%, or at least about 99%, or at least about 100% or more of the affinity of a native GH not bound to XTEN for the target receptor or ligand. In some cases, the binding affinity K_{d} between the subject GHXTEN and a native receptor or ligand of the GHXTEN is at least about 10⁻⁴M, alternatively at least about 10⁻⁵M, alternatively at least about 10⁻⁶M, or at least about 10⁻⁷M, or at least about 10⁻⁸M, or at least about 10⁻⁹M of the affinity between the GHXTEN and a native receptor or ligand.

[0230] In other embodiments, the invention provides isolated GHXTEN fusion proteins specifically designed to have reduced binding affinity to the GH receptor. In one embodiments, such as fusion proteins comprising an XTEN fused to the C-terimnus of the GH 1 about 97% sequence identity, or at least about 99% sequence identity to GH fusion proteins selected from AE912-hGH-AE144, AE912-hGH-AF144, AE912-hGH-AE288, AM923-hGH-AE144, AM923-hGH-AF144, AM923-hGH-AE288, and the sequences of Tables 36-37.

[0231] In some embodiments, the GHXTEN fusion proteins of the invention retain at least about 0.05%, or about 0.1%, or about 1%, or about 10%, or about 20%, or about 30%, or about 40%, or about 50%, or about 60%, or about 70%, or about 80%, or about 90%, or about 95%, or about 98%, or or about 99% percent of the biological activity of the corresponding GH not linked to the fusion protein with regard to an in vitro biologic activity or pharmacologic effect known or associated with the use of the native GH in the treatment and prevention of growth hormone-related diseases, disortder and conditions. Non-limiting examples of activities or pharmacologic effects that can be assayed to assess the retained activity of the GHXTEN fusion proteins include signal transduction markers in cells with GH receptors, elicited IGF-1 concentrations, elicited IGFBP3 concentrations, changes in height velocity, lean body mass, total body fat, trunk fat, parameters associated with insulin resistance syndrome, measurement of division and multiplication rates of chondrocytes, changes in bone density, and bone growth (e.g. increase in epiphyseal plate width). In some embodiments, the activity of the GH component is manifest by the intact GHXTEN fusion protein, while in other cases the activity of the GH component would be primarily manifested upon cleavage and release of the GH from the fusion protein by action of a protease that acts on a cleavage sequence incorporated into the GHXTEN fusion protein. In the foregoing, the GHXTEN is designed to reduce the binding affinity of the GH component for the receptor or ligand when linked to the XTEN but have restored or increased affinity when released from XTEN through the cleavage of cleavage sequence(s) incorporated into the GHXTEN sequence, as described more fully above.

[0232] In other cases, the GHXTEN can be designed to reduce the binding affinity of the GH component to the GH receptor to increase the terminal half-life of GHXTEN administered to a subject by reducing receptor-mediated clearance; e.g., by adding an XTEN to the C-terminus of the GH component of the fusion protein. In other cases, the GHXTEN are designed to reduce the binding affinity of the GH component to the GH receptor to reduce toxicity or side effects due to the administered composition.

[0233] Accordingly, the invention provides a method for increasing the terminal half-life of a GHXTEN by producing a single-chain fusion protein construct with a specific N- to C-terminus configuration of the components comprising at least a first GH and a first and a second XTEN, wherein the fusion protein in a first N- to C-terminus configuration of the GH and XTEN components has reduced receptor-mediated clearance (RMC) and a corresponding increase in terminal half-life compared to a GHXTEN in a second N- to C-terminus configuration. In one embodiment of the foregoing, the GHXTEN is configured, N- to C-terminus as XTEN-GH-XTEN, which has reduced receptor binding compared to a GHXTEN configures, N- to C-terminus XTEN-GH. In another embodiment of the foregoing, the GHXTEN is configured GH-XTEN. In the foregoing embodiments, the two XTEN molecules can be identical or they can be of a different sequence composition or length. Non-limiting examples of the foregoing embodiment with two XTEN linked to a single GH include the constructs AE912-hGH-AE144, AE912-hGH-AE288, AE864-hGH-AE144, AM923-hGH-AE144, and AM923-hGH-AE288. The invention contemplates other such constructs in which a GH from Table 1 and XTEN from Table 3 are substituted for the respective components of the foregoing examples, and are produced, for example, in a configuration from Table 5 such that the construct has reduced receptor mediated clearance compared to an alterntive configuration of the respective components. In some embodiments, the foregoing method for increasing the terminal half-life provides configured GHXTEN that can result in an increase in the terminal half-life of at least about 30%, or about 50%, or about 75%, or about 100%, or about 150%, or about 200%, or about 300%, or about 400% or more compared to the half-life of a GHXTEN in a second configuration where receptor binding is not reduced. The invention takes advantage of the fact that certain ligands wherein reduced binding affinity to a receptor, either as a result of a decreased on-rate or an increased off-rate, may be effected by the obstruction of either the N- or C-terminus (as shown in FIG. 3), and using that terminus as the linkage to another polypeptide of the composition, whether another molecule of a GH, an XTEN, or a spacer sequence results in the reduced binding affinity. The choice of the particular configuration of the GHXTEN fusion protein reduces the degree of binding affinity to the receptor such that a reduced rate of receptor-mediated clearance is achieved. Generally, activation of the receptor is coupled to RMC such that binding of a polypeptide to its receptor without activation does not lead to RMC, while activation of the receptor leads to RMC. However, in some cases, particularly where the ligand has an increased off rate, the ligand may nevertheless be able to bind sufficiently to initiate cell signaling without triggering receptor mediated clearance, with the net result that the GHXTEN remains bioavailable. In such cases, the configured GHXTEN has an increased half-life compared to those configurations that lead to a higher degree of RMC.

[0234] In cases where a reduction in binding affinity to the growth hormone receptor is desired in order to reduce receptor-mediated clearance but retention of at least a portion of the biological activity is also desired, sufficient binding affinity to obtain the desired receptor activation must nevertheless be maintained e.g., by initiation of signal transduction. Thus, in one embodiment, the invention provides a GHXTEN configured such that the binding affinity of the GHXTEN for a target receptor is in the range of about 0.01%-40%, or about 0.01%-30%, or about 0.01%-20% of the binding affinity compared to a corresponding GHXTEN in a configuration wherein the binding affinity is not reduced. The binding affinity of the configured BXTEN is thus preferably reduced by at least about 60%, or at least about 70%, or at least about 80%, or at least about 90%, or at least about 95%, or at least about 99%, or at least about 99.99% as compared to the binding affinity of a corresponding GHXTEN in a configuration wherein the binding affinity of the GH component to the target receptor is not reduced or compared to the GH not linked to the fusion protein, determined under comparable conditions. Expressed differently, the GH component of the configured GHXTEN has a binding affinity that is as small as about 0.01%, or at least about 0.1%, or at least about 1%, or at least about 2%, or at least about 3%, or at least about 4%, or at least about 5%, or at least about 10%, or at least about 20%, or at least about 30%, or at least 40% of that of the corresponding GH component of a GHXTEN in a configuration wherein the binding affinity of the GH component is not reduced. In the foregoing embodiments, the binding affinity of the configured GHXTEN for the target receptor are “substantially reduced” compared to a corresponding native GH or a GHXTEN with a configuration in which the binding affinity of the corresponding GH component is not reduced. Accordingly, the present invention provides compositions and methods to produce compositions with reduced RMC by configuring the GHXTEN, examples of which areprovided above, so as to be able to bind and activate a sufficient number of receptors to obtain a desired in vivo biological response yet avoid activation of more receptors than is required for obtaining such response. The increased half-life permits higher dosages and reduced frequency of dosing compared to GH not linked to XTEN or compared to GHXTEN configurations wherein the GH component retains sufficient biological or pharmacological activity to result in a composition with clinical efficacy maintained despite reduced dosing frequency.

### VI). Uses of the Compositions of the Present Invention

[0235] In another aspect, the invention provides a method for achieving a beneficial effect in a disease, disorder or condition mediated by GH. The present invention addresses disadvantages and/or limitations of GH that have a relatively short terminal half-life and/or a narrow therapeutic window.

[0236] Most processes involved in growth of the body are regulated by multiple peptides and hormones, and such peptides and hormones, as well as analogues thereof, have found utility in the treatment of growth hormone-related diseases, disorders and conditions. However, the use of commercially-avaiable growth hormones, has met with less than optimal success in the management of subjects afflicted with such diseases, disorders and conditions. In particular, dose optimization and frequency of dosing is important for peptide and hormone biologics used in the treatment of growth hormone-related diseases and disorders. The fact that growth hormone has a short half-life, necessitates frequent dosing in order to achieve clinical benefit, which results in difficulties in the management of such patients.

[0237] In one embodiment, the invention provides a method for achieving a beneficial affect in a subject with a growth hormone-related disease, disorder or condition comprising the step of administering to the subject a therapeutically- or prophylactically-effective amount of a GHXTEN wherein said administration results in the improvement of one or more biochemical or physiological parameters or clinical endpoints associated with a growth hormone-related disease, disorder or condition. The effective amount produces a beneficial effect in helping to treat (e.g., cure or reduce the severity) or prevent (e.g., reduce the likelihood of onset or severity) a growth hormone-related disease, disorder or condition. In some cases, the method for achieving a beneficial effect includes administering a therapeutically effective amount of a GHXTEN fusion protein composition to treat a subject with a growth hormone-related disease, disorder, or condition, including, but not limited to, congenital or acquired GH deficiency in adults and children, Turner's Syndrome, Prader-Willi Syndrome, chronic renal failure, intrauterine growth retardation, idiopathic short stature, AIDS wasting, obesity, multiple sclerosis, aging, fibromyalgia, Crohn's disease, ulcerative colitis, muscular dystrophy, low muscle mass (e.g. bodybuilding), low bone density, or any other indication for which GH can be utilized (but for which endogenous growth hormone levels in a subject are not necessarily deficient).

[0238] In another embodiment, the invention provides a method of stimulating IGF-1 production in individuals with GH deficiency. The method comprises the step of administering therapeutically effective amount of GHXTEN to a subject that results in the increased blood levels and/or duration in increased blood levels of IGF-1 compared to a subject receiving a GH not linked to an XTEN and administered at a comparable dose. In some cases, the increase in IGF-1 is at least about 20%, or at least about 30%, or at least about 40%, or at least about 50%, or at least about 75%, or at least about 100%, or at least about 200%, or at least about 300%. In another embodiment, the invention provides a method of stimulating the division and numbers of chrondrocytes. The method comprises the step of administering therapeutically effective amount of GHXTEN that results in the increased production of chrondrocytes by at least about 20%, or at least about 30%, or at least about 40%, or at least about 50%, or at least about 75%, or at least about 100%, or at least about 200%, or at least about 300% compared to a subject receiving a GH not linked to an XTEN and administered at a comparable dose. In another embodiment, the invention provides a method comprising the step of administering therapeutically effective amount of GHXTEN that results in increased bone growth as measured by increase in epiphyseal plate width by at least about 20%, or at least about 30%, or at least about 40%, or at least about 50%, or at least about 75%, or at least about 100%, or at least about 200%, or at least about 300% compared to a subject receiving a GH not linked to an XTEN and administered at a comparable dose.

[0239] As a result of the enhanced PK parameters of GHXTEN, as described herein, the GH is administered using longer intervals between doses compared to the corresponding GH not linked to XTEN to prevent, treat, alleviate, reverse or ameliorate symptoms or clinical abnormalities of the growth hormone-related disease, disorder or condition or prolong the survival of the subject being treated.

[0240] The methods of the invention includes administration of consecutive doses of a therapeutically effective amount of the GHXTEN for a period of time sufficient to achieve and/or maintain the desired parameter or clinical effect, and such consecutive doses of a therapeutically effective amount establishes the therapeutically effective dose regimen for the GHXTEN; i.e., the schedule for consecutively administered doses of the fusion protein composition, wherein the doses are given in therapeutically effective amounts to result in a sustained beneficial effect on any clinical sign or symptom, aspect, measured parameter or characteristic of a metabolic disease state or condition, including, but not limited to, those described herein. In one embodiment, the method comprises administering a therapeutically-effective amount of a pharmaceutical composition comprising a GHXTEN fusion protein composition comprising a GH linked to an XTEN sequence(s) and at least one pharmaceutically acceptable carrier to a subject in need thereof that results in greater improvement in at least one parameter, physiologic condition, or clinical outcome mediated by the GH component(s) (non-limiting examples of which are described above) compared to the effect mediated by administration of a pharmaceutical composition comprising a GH not linked to XTEN and administered at a comparable dose. In one embodiment, the pharmaceutical composition is administered at a therapeutically effective dose. In another embodiment, the pharmaceutical composition is administered using multiple consecutive doses using a therapeutically effective dose regimen (as defined herein) for the length of the dosing period.

[0241] A therapeutically effective amount of the GHXTEN varies according to factors such as the disease state, age, sex, and weight of the individual, and the ability of the antibody or antibody portion to elicit a desired response in the individual. A therapeutically effective amount is also one in which any toxic or detrimental effects of the GHXTEN are outweighed by the therapeutically beneficial effects. A prophylactically effective amount refers to an amount of GHXTEN required for the period of time necessary to achieve the desired prophylactic result.

[0242] For the inventive methods, longer acting GHXTEN compositions are preferred, so as to improve patient convenience, to increase the interval between doses and to reduce the amount of drug required to achieve a sustained effect. In one embodiment, a method of treatment comprises administration of a therapeutically effective dose of a GHXTEN to a subject in need thereof that results in a gain in time spent within a therapeutic window established for the fusion protein of the composition compared to the corresponding GH component(s) not linked to the fusion protein and administered at a comparable dose to a subject. In some cases, the gain in time spent within the therapeutic window is at least about three-fold, or at least about four-fold, or at least about five-fold, or at least about six-fold, or at least about eight-fold, or at least about 10-fold, or at least about 20-fold, or at least about 40-fold, or at least about 80-fold, or at least about 100-fold longer, compared to the corresponding GH component not linked to the fusion protein and administered at a comparable dose to a subject. The methods further provide that administration of multiple consecutive doses of a GHXTEN administered using a therapeutically effective dose regimen to a subject in need thereof results in a gain in time between consecutive Cₘₐₓ peaks and/or Cₘᵢₙ troughs for blood levels of the fusion protein compared to the corresponding GH not linked to the fusion protein and administered using a dose regimen established for that GH. In the foregoing embodiment, the gain in time spent between consecutive Cₘₐₓ peaks and/or Cₘᵢₙ troughs is at least about three-fold, or at least about four-fold, or at least about five-fold, or at least about six-fold, or at least about eight-fold, or at least about 10-fold, or at least about 20-fold, or at least about 40-fold or at least about 80-fold, or at least about 100-fold longer, compared to the corresponding GH component not linked to the fusion protein and administered using a dose regimen established for that GH. In the embodiments hereinabove described in this paragraph the administration of the fusion protein results in an improvement in at least one of the parameters (disclosed herein as being useful for assessing the subject diseases, conditions or disorders) using a lower unit dose in moles of fusion protein compared to the corresponding GH component not linked to the fusion protein and administered at a comparable unit dose or dose regimen to a subject.

[0243] The method of treatment comprises administration of a GHXTEN using a therapeutically effective dose regimen to effect improvements in one or more parameters associated with growth hormone diseases, disorders or conditions. In some embodiments, administration of the GHXTEN to a subject results in an improvement in one or more of the biochemical, physiologic, or clinical parameters that is of greater magnitude than that of the corresponding GH component not linked to XTEN, determined using the same assay or based on a measured clinical parameter. In other embodiments, administration of the GHXTEN to a subject using a therapeutically effective dose regimen results in activity in one or more of the biochemical, physiologic, or clinical parameters that is of longer duration than the activity of one of the single GH components not linked to XTEN, determined using that same assay or based on a measured clinical parameter. In one embodiment of the foregoing, the administration of the GHXTEN to a subject using a therapeutically effective dose regimen results in an improvement in peak concentrations and area under the curve of blood IGF-1 levels of at least about 10%, or about 20%, or about 30%, or about 40%, or about 50%, or about 60%, or about 70%, or about 80%, or about 90%, or about 100% or more in the subject compared to a comparable dose of GH not linked to XTEN administered to a subject. In another embodiment of the foregoing, the administration of the GHXTEN to a subject using a therapeutically effective dose regimen results in increased weight gain in the subject of at least about 10%, or about 20%, or about 30%, or about 40%, or about 50% or more compared to a comparable dose regimen of GH not linked to XTEN administered to a subject.

[0244] The invention further contemplates that GHXTEN used in accordance with the methods provided herein is administered in conjunction with other treatment methods and pharmaceutical compositions useful for treating growth hormone-related diseases, disorders, and conditions, or conditions for which growth hormone is adjunctive therapy; e.g., insulin resistance and poor glycemic control. Such compositions, include for example, DPP-IV inhibitors, insulin, insulin analogues, PPAR gamma agonists, dual-acting PPAR agonists, GLP-1 agonists or analogues, PTP1B inhibitors, SGLT inhibitors, insulin secretagogues, RXR agonists, glycogen synthase kinase-3 inhibitors, insulin sensitizers, immune modulators, beta-3 adrenergic receptor agonists, Pan-PPAR agonists, 11beta-HSD1 inhibitors, biguanides, alpha-glucosidase inhibitors, meglitinides, thiazolidinediones, sulfonylureas and other diabetes medicants known in the art, or anti-hypertensive drugs, calcium channel blockers, and related products. In some embodiments, the administration of a GHXTEN permits use of lower dosages of the co-administered pharmaceutical composition to achieve a comparable clinical effect or measured parameter for the disease, disorder or condition in the subject.

[0245] In another aspect, the invention provides a method of designing the GHXTEN compositions with desired pharmacologic or pharmaceutical properties. The GHXTEN fusion proteins are designed and prepared with various objectives in mind (compared to the GH components not linked to the fusion protein), including improving the therapeutic efficacy for the treatment of growth hormone-related diseases, disorders, and conditions, enhancing the pharmacokinetic characteristics of the fusion proteins compared to the GH, lowering the dose or frequency of dosing required to achieve a pharmacologic effect, enhancing the pharmaceutical properties, and to enhance the ability of the GH components to remain within the therapeutic window for an extended period of time.

[0246] In general, the steps in the design and production of the fusion proteins and the inventive compositions, as illustrated in FIGS. 4-6, include: (1) the selection of GHs (e.g., native proteins, analogs or derivatives with activity) to treat the particular disease, disorder or condition; (2) selecting the XTEN that will confer the desired PK and physicochemical characteristics on the resulting GHXTEN (e.g., the administration of the composition to a subject results in the fusion protein being maintained within the therapeutic window for a greater period compared to GH not linked to XTEN); (3) establishing a desired N- to C-terminus configuration of the GHXTEN to achieve the desired efficacy or PK parameters; (4) establishing the design of the expression vector encoding the configured GHXTEN; (5) transforming a suitable host with the expression vector; and (6) expression and recovery of the resultant fusion protein. For those GHXTEN for which an increase in half-life (greater than 24 h) or an increased period of time spent within a therapeutic window is desired, the XTEN chosen for incorporation generally has at least about 500, or about 576, or about 864, or about 875, or about 912, or about 923 amino acid residues where a single XTEN is to be incorporated into the GHXTEN. In another embodiment, the GHXTEN comprises a first XTEN of the foregoing lengths, and a second XTEN of about 144, or about 288, or about 576, or about 864, or about 875, or about 912, or about 923 amino acid residues.

[0247] In other embodiments, where an increase in half-life is not required, but an increase in a pharmaceutical property (e.g., solubility) is desired, a GHXTEN is designed to include XTEN of shorter lengths. In some embodiments of the foregoing, the GHXTEN comprises a GH linked to an XTEN having at least about 24, or about 36, or about 48, or about 60, or about 72, or about 84, or about 96 amino acid residues, in which the solubility of the fusion protein under physiologic conditions is at least three-fold greater than the corresponding GH not linked to XTEN, or alternatively, at least four-fold, or five-fold, or six-fold, or seven-fold, or eight-fold, or nine-fold, or at least 10-fold, or at least 20-fold, or at least 30-fold, or at least 50-fold, or at least 60-fold or greater than GH not linked to XTEN. In one embodiment of the foregoing, the GH is human growth hormone.

[0248] In another aspect, the invention provides methods of making GHXTEN compositions to improve ease of manufacture, result in increased stability, increased water solubility, and/or ease of formulation, as compared to the native GH. In one embodiment, the invention includes a method of increasing the water solubility of a GH comprising the step of linking the GH to one or more XTEN such that a higher concentration in soluble form of the resulting GHXTEN can be achieved, under physiologic conditions, compared to the GH in an un-fused state. Factors that contribute to the property of XTEN to confer increased water solubility of GHs when incorporated into a fusion protein include the high solubility of the XTEN fusion partner and the low degree of self-aggregation between molecules of XTEN in solution. In some embodiments, the method results in a GHXTEN fusion protein wherein the water solubility is at least about 20%, or at least about 30% greater, or at least about 50% greater, or at least about 75% greater, or at least about 90% greater, or at least about 100% greater, or at least about 150% greater, or at least about 200% greater, or at least about 400% greater, or at least about 600% greater, or at least about 800% greater, or at least about 1000% greater, or at least about 2000% greater, or at least about 4000% greater, or at least about 6000% greater under physiologic conditions, compared to the un-fused GH.

[0249] In another embodiment, the invention includes a method of increasing the shelf-life of a GH comprising the step of linking the GH with one or more XTEN selected such that the shelf-life of the resulting GHXTEN is extended compared to the GH in an un-fused state. As used herein, shelf-life refers to the period of time over which the functional activity of a GH or GHXTEN that is in solution or in some other storage formulation remains stable without undue loss of activity. As used herein, “functional activity” refers to a pharmacologic effect or biological activity, such as the ability to bind a receptor or ligand, or an enzymatic activity, or to display one or more known functional activities associated with a GH, as known in the art. A GH that degrades or aggregates generally has reduced functional activity or reduced bioavailability compared to one that remains in solution. Factors that contribute to the ability of the method to extend the shelf life of GHs when incorporated into a fusion protein include increased water solubility, reduced self-aggregation in solution, and increased heat stability of the XTEN fusion partner. In particular, the low tendency of XTEN to aggregate facilitates methods of formulating pharmaceutical preparations containing higher drug concentrations of GHs, and the heat-stability of XTEN contributes to the property of GHXTEN fusion proteins to remain soluble and functionally active for extended periods. In one embodiment, the method results in GHXTEN fusion proteins with “prolonged” or “extended” shelf-life that exhibit greater activity relative to a standard that has been subjected to the same storage and handling conditions. The standard may be the un-fused full-length GH. In one embodiment, the method includes the step of formulating the isolated GHXTEN with one or more pharmaceutically acceptable excipients that enhance the ability of the XTEN to retain its unstructured conformation and for the GHXTEN to remain soluble in the formulation for a time that is greater than that of the corresponding un-fused GH. In one embodiment, the method comprises linking a GH to one or more XTEN to create a GHXTEN fusion protein results in a solution that retains greater than about 100% of the functional activity, or greater than about 105%, 110%, 120%, 130%, 150% or 200% of the functional activity of a standard when compared at a given time point and when subjected to the same storage and handling conditions as the standard, thereby increasing its shelf-life.

[0250] Shelf-life may also be assessed in terms of functional activity remaining after storage, normalized to functional activity when storage began. GHXTEN fusion proteins of the invention with prolonged or extended shelf-life as exhibited by prolonged or extended functional activity retains about 50% more functional activity, or about 60%, 70%, 80%, or 90% more of the functional activity of the equivalent GH not linked to XTEN when subjected to the same conditions for the same period of time. For example, a GHXTEN fusion protein of the invention comprising human growth hormone fused to one or more XTEN sequences retains about 80% or more of its original activity in solution for periods of up to 2 weeks, or 4 weeks, or 6 weeks or longer under various temperature conditions. In some embodiments, the GHXTEN retains at least about 50%, or about 60%, or at least about 70%, or at least about 80%, and most preferably at least about 90% or more of its original activity in solution when heated at 80° C. for 10 min. In other embodiments, the GHXTEN retains at least about 50%, preferably at least about 60%, or at least about 70%, or at least about 80%, or alternatively at least about 90% or more of its original activity in solution when heated or maintained at 37° C. for about 7 days. In another embodiment, GHXTEN fusion protein retains at least about 80% or more of its functional activity after exposure to a temperature of about 30° C. to about 70° C. over a period of time of about one hour to about 18 hours. In the foregoing embodiments hereinabove described in this paragraph, the retained activity of the GHXTEN is at least about two-fold, or at least about three-fold, or at least about four-fold, or at least about five-fold, or at least about six-fold greater at a given time point than that of the corresponding GH not linked to the fusion protein.

### VII). The Nucleic Acids Sequences of the Invention

[0251] The present invention provides isolated polynucleic acids encoding GHXTEN chimeric fusion proteins and sequences complementary to polynucleic acid molecules encoding GHXTEN chimeric fusion proteins, including homologous variants thereof. In another aspect, the invention encompasses methods to produce polynucleic acids encoding GHXTEN chimeric fusion proteins and sequences complementary to polynucleic acid molecules encoding GHXTEN chimeric fusion protein, including homologous variants thereof. In general, and as illustrated in FIGS. 4-6, the methods of producing a polynucleotide sequence coding for a GHXTEN fusion protein and expressing the resulting gene product include assembling nucleotides encoding GH and XTEN, ligating the components in frame, incorporating the encoding gene into an expression vector appropriate for a host cell, transforming the appropriate host cell with the expression vector, and culturing the host cell under conditions causing or permitting the fusion protein to be expressed in the transformed host cell, thereby producing the biologically-active GHXTEN polypeptide, which is recovered as an isolated fusion protein by standard protein purification methods known in the art. Standard recombinant techniques in molecular biology is used to make the polynucleotides and expression vectors of the present invention.

[0252] In accordance with the invention, nucleic acid sequences that encode GHXTEN (or its complement) is used to generate recombinant DNA molecules that direct the expression of GHXTEN fusion proteins in appropriate host cells. Several cloning strategies are suitable for performing the present invention, many of which is used to generate a construct that comprises a gene coding for a fusion protein of the GHXTEN composition of the present invention, or its complement. In some embodiments, the cloning strategy is used to create a gene that encodes a monomeric GHXTEN that comprises at least a first GH and at least a first XTEN polypeptide, or their complement. In one embodiment of the foregoing, the gene comprises a sequence encoding a hGH or sequence variant. In other embodiments, the cloning strategy is used to create a gene that encodes a monomeric GHXTEN that comprises nucleotides encoding at least a first molecule of GH or its complement and a first and at least a second XTEN or their complement that is used to transform a host cell for expression of the fusion protein of the GHXTEN composition. In the foregoing embodiments hereinabove described in this paragraph, the genes can further comprise nucleotides encoding spacer sequences that also encodes cleavage sequence(s).

[0253] In designing a desired XTEN sequences, it was discovered that the non-repetitive nature of the XTEN of the inventive compositions is achieved despite use of a “building block” molecular approach in the creation of the XTEN-encoding sequences. This was achieved by the use of a library of polynucleotides encoding peptide sequence motifs, described above, that are then ligated and/or multimerized to create the genes encoding the XTEN sequences (see FIGS. 4 and 5 and Examples). Thus, while the XTEN(s) of the expressed fusion protein may consist of multiple units of as few as four different sequence motifs, because the motifs themselves consist of non-repetitive amino acid sequences, the overall XTEN sequence is rendered non-repetitive. Accordingly, in one embodiment, the XTEN-encoding polynucleotides comprise multiple polynucleotides that encode non-repetitive sequences, or motifs, operably linked in frame and in which the resulting expressed XTEN amino acid sequences are non-repetitive.

[0254] In one approach, a construct is first prepared containing the DNA sequence corresponding to GHXTEN fusion protein. DNA encoding the GH of the compositions is obtained from a cDNA library prepared using standard methods from tissue or isolated cells believed to possess GH mRNA and to express it at a detectable level. Libraries is screened with probes containing, for example, about 20 to 100 bases designed to identify the GH gene of interest by hybridization using conventional molecular biology techniques. The best candidates for probes are those that represent sequences that are highly homologous for human growth hormone, and should be of sufficient length and sufficiently unambiguous that false positives are minimized, but may be degenerate at one or more positions. If necessary, the coding sequence can be obtained using conventional primer extension procedures as described in Sambrook, et al., supra, to detect precursors and processing intermediates of mRNA that may not have been reverse-transcribed into cDNA. One can then use polymerase chain reaction (PCR) methodology to amplify the target DNA or RNA coding sequence to obtain sufficient material for the preparatin of the GHXTEN constructs containing the GH gene(s). Assays can then be conducted to confirm that hybridizing full-length genes are the desired GH gene(s). By these conventional methods, DNA can be conveniently obtained from a cDNA library prepared from such sources. The GH encoding gene(s) is also be obtained from a genomic library or created by standard synthetic procedures known in the art (e.g., automated nucleic acid synthesis using, for example one of the methods described in Engels et al. (Agnew. Chem. Int. Ed. Engl., 28:716-734 1989)), using DNA sequences obtained from publicly available databases, patents, or literature references. Such procedures are well known in the art and well described in the scientific and patent literature. For example, sequences can be obtained from Chemical Abstracts Services (CAS) Registry Numbers (published by the American Chemical Society) and/or GenBank Accession Numbers (e.g., Locus ID, NP_XXXXX, and XP_XXXXX) Model Protein identifiers available through the National Center for Biotechnology Information (NCBI) webpage, available on the world wide web at ncbi.nlm.nih.gov that correspond to entries in the CAS Registry or GenBank database that contain an amino acid sequence of the protein of interest or of a fragment or variant of the protein. For such sequence identifiers provided herein, the summary pages associated with each of these CAS and GenBank and GenSeq Accession Numbers as well as the cited journal publications (e.g., PubMed ID number (PMID)) are each incorporated by reference in their entireties, particularly with respect to the amino acid sequences described therein. In one embodiment, the GH encoding gene encodes a protein from any one of Table 1, or a fragment or variant thereof.

[0255] A gene or polynucleotide encoding the GH portion of the subject GHXTEN protein, in the case of an expressed fusion protein that comprises a single GH is then be cloned into a construct, which is a plasmid or other vector under control of appropriate transcription and translation sequences for high level protein expression in a biological system. In a later step, a second gene or polynucleotide coding for the XTEN is genetically fused to the nucleotides encoding the N- and/or C-terminus of the GH gene by cloning it into the construct adjacent and in frame with the gene(s) coding for the GH. This second step occurs through a ligation or multimerization step. In the foregoing embodiments hereinabove described in this paragraph, it is to be understood that the gene constructs that are created can alternatively be the complement of the respective genes that encode the respective fusion proteins.

[0256] The gene encoding for the XTEN can be made in one or more steps, either fully synthetically or by synthesis combined with enzymatic processes, such as restriction enzyme-mediated cloning, PCR and overlap extension, including methods more fully described in the Examples. The methods disclosed herein can be used, for example, to ligate short sequences of polynucleotides encoding XTEN into longer XTEN genes of a desired length and sequence. In one embodiment, the method ligates two or more codon-optimized oligonucleotides encoding XTEN motif or segment sequences of about 9 to 14 amino acids, or about 12 to 20 amino acids, or about 18 to 36 amino acids, or about 48 to about 144 amino acids, or about 144 to about 288 or longer, or any combination of the foregoing ranges of motif or segment lengths.

[0257] Alternatively, the disclosed method is used to multimerize XTEN-encoding sequences into longer sequences of a desired length; e.g., a gene encoding 36 amino acids of XTEN can be dimerized into a gene encoding 72 amino acids, then 144, then 288, etc. Even with multimerization, XTEN polypeptides can be constructed such that the XTEN-encoding gene has low or vitually no repetitiveness through design of the codons selected for the motifs of the shortest unit used, which can reduce recombination and increase stability of the encoding gene in the transformed host. Genes encoding XTEN with non-repetitive sequences is assembled from oligonucleotides using standard techniques of gene synthesis. The gene design can be performed using algorithms that optimize codon usage and amino acid composition. In one method of the invention, a library of relatively short XTEN-encoding polynucleotide constructs is created and then assembled, as illustrated in FIGS. 4 and 5. This can be a pure codon library such that each library member has the same amino acid sequence but many different coding sequences are possible. Such libraries can be assembled from partially randomized oligonucleotides and used to generate large libraries of XTEN segments comprising the sequence motifs. The randomization scheme can be optimized to control amino acid choices for each position as well as codon usage. Exemplary methods to achieve the foregoing are disclosed in the Examples.

[0258] Polynucleotide Libraries

[0259] In another aspect, the invention provides libraries of polynucleotides that encode XTEN sequences that is used to assemble genes that encode XTEN of a desired length and sequence.

[0260] In certain embodiments, the XTEN-encoding library constructs comprise polynucleotides that encode polypeptide segments of a fixed length. As an initial step, a library of oligonucleotides that encode motifs of 9-14 amino acid residues can be assembled. In a preferred embodiment, libraries of oligonucleotides that encode motifs of 12 amino acids are assembled.

[0261] The XTEN-encoding sequence segments can be dimerized or multimerized into longer encoding sequences. Dimerization or multimerization can be performed by ligation, overlap extension, PCR assembly or similar cloning techniques known in the art. This process of can be repeated multiple times until the resulting XTEN-encoding sequences have reached the organization of sequence and desired length, providing the XTEN-encoding genes. As will be appreciated, a library of polynucleotides that encodes, e.g., 12 amino acid motifs can be dimerized and/or ligated into a library of polynucleotides that encode 36 amino acids. Libraries encoding motifs of different lengths; e.g., 9-14 amino acid motifs leading to libraries encoding 27 to 42 amino acids are contemplated by the invention. In turn, the library of polynucleotides that encode 27 to 42 amino acids, and preferably 36 amino acids (as described in the Examples) can be serially dimerized into a library containing successively longer lengths of polynucleotides that encode XTEN sequences of a desired length for incorporation into the gene encoding the GHXTEN fusionprotein, as disclosed herein. In some embodiments, libraries are assembled of polynucleotides that encode amino acids that are limited to specific sequence XTEN families; e.g., AD, AE, AF, AG, AM, or AQ sequences of Table 2. In other embodiments, libraries comprise sequences that encode two or more of the motif family sequences from Table 2. The names and sequences of representative, non-limiting polynucleotide sequences of libraries that encode 36mers are presented in Tables 8-11, and the methods used to create them are described more fully in the Examples. In other embodiments, libraries that encode XTEN are constructed from segments of polynucleotide codons linked in a randomized sequence that encode amino acids wherein at least about 80%, or at least about 90%, or at least about 91%, or at least about 92%, or at least about 93%, or at least about 94%, or at least about 95%, or at least about 97%, or at least about 98%, or at least about 99% of the codons are selected from the group consisting of condons for glycine (G), alanine (A), serine (S), threonine (T), glutamate (E) and proline (P) amino acids. The libraries can be used, in turn, for serial dimerization or ligation to achieve polynucleotide sequence libraries that encode XTEN sequences, for example, of 48, 72, 144, 288, 576, 864, 875, 912, 923, 1318 amino acids, or up to a total length of about 3000 amino acids, as well as intermediate lengths, in which the encoded XTEN can have one or more of the properties disclosed herein, when expressed as a component of a GHXTEN fusion protein. In some cases, the polynucleotide library sequences may also include additional bases used as “sequencing islands,” described more fully below.

[0262] FIG. 5 is a schematic flowchart of representative, non-limiting steps in the assembly of a XTEN polynucleotide construct and a GHXTEN polynucleotide construct in the embodiments of the invention. Individual oligonucleotides 501 are annealed into sequence motifs 502 such as a 12 amino acid motif (“12-mer”), which is subsequently ligated with an oligo containing BbsI, and KpnI restriction sites 503. Additional sequence motifs from a library are annealed to the 12-mer until the desired length of the XTEN gene 504 is achieved. The XTEN gene is cloned into a stuffer vector. The vector optionally encodes a Flag sequence 506 followed by a stuffer sequence that is flanked by BsaI, BbsI, and KpnI sites 507 and, in this case, a single GH gene (encoding hGH in this example) 508, resulting in the gene encoding a GHXTEN comprising a single GH 500. A non-exhaustive list of the XTEN names for polynucleotides encoding XTEN and precursor sequences is provided in Table 7.

TABLE 7
DNA sequences of XTEN and precursor sequences

| XTEN | SEQ ID | |
|---|---|---|
| Name | NO: | DNA Nucleotide Sequence |
| AE48 | 107 | ATGGCTGAACCTGCTGGCTCTCCAACCTCCACTGAGGAAGGTACCCCGGGTAGC |
| | | GGTACTGCTTCTTCCTCTCCAGGTAGCTCTACCCCTTCTGGTGCAACCGGCTCTC |
| | | CAGGTGCTTCTCCGGGCACCAGCTCTACCGGTTCT |
| AM48 | 108 | ATGGCTGAACCTGCTGGCTCTCCAACCTCCACTGAGGAAGGTGCATCCCCGGGC |
| | | ACCAGCTCTACCGGTTCTCCAGGTAGCTCTACCCCGTCTGGTGCTACCGGCTCTC |
| | | CAGGTAGCTCTACCCCGTCTGGTGCTACTGGCTCT |
| AE144 | 109 | GGTAGCGAACCGGCAACTTCCGGCTCTGAAACCCCAGGTACTTCTGAAAGCGCT |
| | | ACTCCTGAGTCTGGCCCAGGTAGCGAACCTGCTACCTCTGGCTCTGAAACCCCA |
| | | GGTAGCCCGGCAGGCTCTCCGACTTCCACCGAGGAAGGTACCTCTACTGAACCT |
| | | TCTGAGGGTAGCGCTCCAGGTAGCGAACCGGCAACCTCTGGCTCTGAAACCCCA |
| | | GGTAGCGAACCTGCTACCTCCGGCTCTGAAACTCCAGGTAGCGAACCGGCTACT |
| | | TCCGGTTCTGAAACTCCAGGTACCTCTACCGAACCTTCCGAAGGCAGCGCACCA |
| | | GGTACTTCTGAAAGCGCAACCCCTGAATCCGGTCCAGGTAGCGAACCGGCTACT |
| | | TCTGGCTCTGAGACTCCAGGTACTTCTACCGAACCGTCCGAAGGTAGCGCACCA |
| AF144 | 110 | GGTACTTCTACTCCGGAAAGCGGTTCCGCATCTCCAGGTACTTCTCCTAGCGGTG |
| | | AATCTTCTACTGCTCCAGGTACCTCTCCTAGCGGCGAATCTTCTACTGCTCCAGG |
| | | TTCTACCAGCTCTACCGCTGAATCTCCTGGCCCAGGTTCTACCAGCGAATCCCCG |
| | | TCTGGCACCGCACCAGGTTCTACTAGCTCTACCGCAGAATCTCCGGGTCCAGGT |
| | | ACTTCCCCTAGCGGTGAATCTTCTACTGCTCCAGGTACCTCTACTCCGGAAAGCG |
| | | GCTCCGCATCTCCAGGTTCTACTAGCTCTACTGCTGAATCTCCTGGTCCAGGTAC |
| | | CTCCCCTAGCGGCGAATCTTCTACTGCTCCAGGTACCTCTCCTAGCGGCGAATCT |
| | | TCTACCGCTCCAGGTACCTCCCCTAGCGGTGAATCTTCTACCGCACCA |
| AE288 | 111 | GGTACCTCTGAAAGCGCAACTCCTGAGTCTGGCCCAGGTAGCGAACCTGCTACC |
| | | TCCGGCTCTGAGACTCCAGGTACCTCTGAAAGCGCAACCCCGGAATCTGGTCCA |
| | | GGTAGCGAACCTGCAACCTCTGGCTCTGAAACCCCAGGTACCTCTGAAAGCGCT |
| | | ACTCCTGAATCTGGCCCAGGTACTTCTACTGAACCGTCCGAGGGCAGCGCACCA |
| | | GGTAGCCCTGCTGGCTCTCCAACCTCCACCGAAGAAGGTACCTCTGAAAGCGCA |
| | | ACCCCTGAATCCGGCCCAGGTAGCGAACCGGCAACCTCCGGTTCTGAAACCCCA |
| | | GGTACTTCTGAAAGCGCTACTCCTGAGTCCGGCCCAGGTAGCCCGGCTGGCTCT |
| | | CCGACTTCCACCGAGGAAGGTAGCCCGGCTGGCTCTCCAACTTCTACTGAAGAA |
| | | GGTACTTCTACCGAACCTTCCGAGGGCAGCGCACCAGGTACTTCTGAAAGCGCT |
| | | ACCCCTGAGTCCGGCCCAGGTACTTCTGAAAGCGCTACTCCTGAATCCGGTCCA |
| | | GGTACTTCTGAAAGCGCTACCCCGGAATCTGGCCCAGGTAGCGAACCGGCTACT |
| | | TCTGGTTCTGAAACCCCAGGTAGCGAACCGGCTACCTCCGGTTCTGAAACTCCA |
| | | GGTAGCCCAGCAGGCTCTCCGACTTCCACTGAGGAAGGTACTTCTACTGAACCT |
| | | TCCGAAGGCAGCGCACCAGGTACCTCTACTGAACCTTCTGAGGGCAGCGCTCCA |
| | | GGTAGCGAACCTGCAACCTCTGGCTCTGAAACCCCAGGTACCTCTGAAAGCGCT |
| | | ACTCCTGAATCTGGCCCAGGTACTTCTACTGAACCGTCCGAGGGCAGCGCACCA |
| AE576 | 112 | GGTAGCCCGGCTGGCTCTCCTACCTCTACTGAGGAAGGTACTTCTGAAAGCGCT |
| | | ACTCCTGAGTCTGGTCCAGGTACCTCTACTGAACCGTCCGAAGGTAGCGCTCCA |
| | | GGTAGCCCAGCAGGCTCTCCGACTTCCACTGAGGAAGGTACTTCTACTGAACCT |
| | | TCCGAAGGCAGCGCACCAGGTACCTCTACTGAACCTTCTGAGGGCAGCGCTCCA |
| | | GGTACTTCTGAAAGCGCTACCCCGGAATCTGGCCCAGGTAGCGAACCGGCTACT |
| | | TCTGGTTCTGAAACCCCAGGTAGCGAACCGGCTACCTCCGGTTCTGAAACTCCA |
| | | GGTAGCCCGGCAGGCTCTCCGACCTCTACTGAGGAAGGTACTTCTGAAAGCGCA |
| | | ACCCCGGAGTCCGGCCCAGGTACCTCTACCGAACCGTCTGAGGGCAGCGCACCA |
| | | GGTACTTCTACCGAACCGTCCGAGGGTAGCGCACCAGGTAGCCCAGCAGGTTCT |
| | | CCTACCTCCACCGAGGAAGGTACTTCTACCGAACCGTCCGAGGGTAGCGCACCA |
| | | GGTACCTCTACTGAACCTTCTGAGGGCAGCGCTCCAGGTACTTCTGAAAGCGCT |
| | | ACCCCGGAGTCCGGTCCAGGTACTTCTACTGAACCGTCCGAAGGTAGCGCACCA |
| | | GGTACTTCTGAAAGCGCAACCCCTGAATCCGGTCCAGGTAGCGAACCGGCTACT |
| | | TCTGGCTCTGAGACTCCAGGTACTTCTACCGAACCGTCCGAAGGTAGCGCACCA |
| | | GGTACTTCTACTGAACCGTCTGAAGGTAGCGCACCAGGTACTTCTGAAAGCGCA |
| | | ACCCCGGAATCCGGCCCAGGTACCTCTGAAAGCGCAACCCCGGAGTCCGGCCC |
| | | AGGTAGCCCTGCTGGCTCTCCAACCTCCACCGAAGAAGGTACCTCTGAAAGCGC |
| | | AACCCCTGAATCCGGCCCAGGTAGCGAACCGGCAACCTCCGGTTCTGAAACCCC |
| | | AGGTACCTCTGAAAGCGCTACTCCGGAGTCTGGCCCAGGTACCTCTACTGAACC |
| | | GTCTGAGGGTAGCGCTCCAGGTACTTCTACTGAACCGTCCGAAGGTAGCGCACC |
| | | AGGTACTTCTACCGAACCGTCCGAAGGCAGCGCTCCAGGTACCTCTACTGAACC |
| | | TTCCGAGGGCAGCGCTCCAGGTACCTCTACCGAACCTTCTGAAGGTAGCGCACC |
| | | AGGTACTTCTACCGAACCGTCCGAGGGTAGCGCACCAGGTAGCCCAGCAGGTTC |
| | | TCCTACCTCCACCGAGGAAGGTACTTCTACCGAACCGTCCGAGGGTAGCGCACC |
| | | AGGTACCTCTGAAAGCGCAACTCCTGAGTCTGGCCCAGGTAGCGAACCTGCTAC |
| | | CTCCGGCTCTGAGACTCCAGGTACCTCTGAAAGCGCAACCCCGGAATCTGGTCC |
| | | AGGTAGCGAACCTGCAACCTCTGGCTCTGAAACCCCAGGTACCTCTGAAAGCGC |
| | | TACTCCTGAATCTGGCCCAGGTACTTCTACTGAACCGTCCGAGGGCAGCGCACC |
| | | AGGTACTTCTGAAAGCGCTACTCCTGAGTCCGGCCCAGGTAGCCCGGCTGGCTC |
| | | TCCGACTTCCACCGAGGAAGGTAGCCCGGCTGGCTCTCCAACTTCTACTGAAGA |
| | | AGGTAGCCCGGCAGGCTCTCCGACCTCTACTGAGGAAGGTACTTCTGAAAGCGC |
| | | AACCCCGGAGTCCGGCCCAGGTACCTCTACCGAACCGTCTGAGGGCAGCGCACCA |
| AF576 | 113 | GGTTCTACTAGCTCTACCGCTGAATCTCCTGGCCCAGGTTCCACTAGCTCTACCG |
| | | CAGAATCTCCGGGCCCAGGTTCTACTAGCGAATCCCCTTCTGGTACCGCTCCAG |
| | | GTTCTACTAGCTCTACCGCTGAATCTCCGGGTCCAGGTTCTACCAGCTCTACTGC |
| | | AGAATCTCCTGGCCCAGGTACTTCTACTCCGGAAAGCGGTTCCGCTTCTCCAGGT |
| | | TCTACCAGCGAATCTCCTTCTGGCACCGCTCCAGGTACCTCTCCTAGCGGCGAAT |
| | | CTTCTACCGCTCCAGGTTCTACTAGCGAATCTCCTTCTGGCACTGCACCAGGTTC |
| | | TACCAGCGAATCTCCTTCTGGCACCGCTCCAGGTACCTCTCCTAGCGGCGAATCT |
| | | TCTACCGCTCCAGGTTCTACTAGCGAATCTCCTTCTGGCACTGCACCAGGTTCTA |
| | | CCAGCGAATCTCCTTCTGGCACCGCTCCAGGTACCTCTCCTAGCGGCGAATCTTC |
| | | TACCGCTCCAGGTTCTACTAGCGAATCTCCTTCTGGCACTGCACCAGGTTCTACT |
| | | AGCGAATCTCCTTCTGGCACTGCACCAGGTTCTACCAGCGAATCTCCGTCTGGC |
| | | ACTGCACCAGGTACCTCTACCCCTGAAAGCGGTTCCGCTTCTCCAGGTTCTACTA |
| | | GCGAATCTCCTTCTGGTACCGCTCCAGGTACTTCTACCCCTGAAAGCGGCTCCGC |
| | | TTCTCCAGGTTCCACTAGCTCTACCGCTGAATCTCCGGGTCCAGGTTCTACTAGC |
| | | TCTACTGCAGAATCTCCTGGCCCAGGTACCTCTACTCCGGAAAGCGGCTCTGCA |
| | | TCTCCAGGTACTTCTACCCCTGAAAGCGGTTCTGCATCTCCAGGTTCTACTAGCG |
| | | AATCCCCGTCTGGTACCGCACCAGGTACTTCTACCCCGGAAAGCGGCTCTGCTT |
| | | CTCCAGGTACTTCTACCCCGGAAAGCGGCTCCGCATCTCCAGGTTCTACTAGCG |
| | | AATCTCCTTCTGGTACCGCTCCAGGTTCTACCAGCGAATCCCCGTCTGGTACTGC |
| | | TCCAGGTTCTACCAGCGAATCTCCTTCTGGTACTGCACCAGGTTCTACTAGCTCT |
| | | ACTGCAGAATCTCCTGGCCCAGGTACCTCTACTCCGGAAAGCGGCTCTGCATCT |
| | | CCAGGTACTTCTACCCCTGAAAGCGGTTCTGCATCTCCAGGTTCTACTAGCGAAT |
| | | CTCCTTCTGGCACTGCACCAGGTTCTACCAGCGAATCTCCGTCTGGCACTGCACC |
| | | AGGTACCTCTACCCCTGAAAGCGGTTCCGCTTCTCCAGGTTCTACTAGCGAATCT |
| | | CCTTCTGGCACTGCACCAGGTTCTACCAGCGAATCTCCGTCTGGCACTGCACCA |
| | | GGTACCTCTACCCCTGAAAGCGGTTCCGCTTCTCCAGGTACTTCTCCGAGCGGTG |
| | | AATCTTCTACCGCACCAGGTTCTACTAGCTCTACCGCTGAATCTCCGGGCCCAGG |
| | | TACTTCTCCGAGCGGTGAATCTTCTACTGCTCCAGGTTCCACTAGCTCTACTGCT |
| | | GAATCTCCTGGCCCAGGTACTTCTACTCCGGAAAGCGGTTCCGCTTCTCCAGGTT |
| | | CTACTAGCGAATCTCCGTCTGGCACCGCACCAGGTTCTACTAGCTCTACTGCAG |
| | | AATCTCCTGGCCCAGGTACCTCTACTCCGGAAAGCGGCTCTGCATCTCCAGGTA |
| | | CTTCTACCCCTGAAAGCGGTTCTGCATCTCCA |
| AE624 | 114 | ATGGCTGAACCTGCTGGCTCTCCAACCTCCACTGAGGAAGGTACCCCGGGTAGC |
| | | GGTACTGCTTCTTCCTCTCCAGGTAGCTCTACCCCTTCTGGTGCAACCGGCTCTC |
| | | CAGGTGCTTCTCCGGGCACCAGCTCTACCGGTTCTCCAGGTAGCCCGGCTGGCT |
| | | CTCCTACCTCTACTGAGGAAGGTACTTCTGAAAGCGCTACTCCTGAGTCTGGTCC |
| | | AGGTACCTCTACTGAACCGTCCGAAGGTAGCGCTCCAGGTAGCCCAGCAGGCTC |
| | | TCCGACTTCCACTGAGGAAGGTACTTCTACTGAACCTTCCGAAGGCAGCGCACC |
| | | AGGTACCTCTACTGAACCTTCTGAGGGCAGCGCTCCAGGTACTTCTGAAAGCGC |
| | | TACCCCGGAATCTGGCCCAGGTAGCGAACCGGCTACTTCTGGTTCTGAAACCCC |
| | | AGGTAGCGAACCGGCTACCTCCGGTTCTGAAACTCCAGGTAGCCCGGCAGGCTC |
| | | TCCGACCTCTACTGAGGAAGGTACTTCTGAAAGCGCAACCCCGGAGTCCGGCCC |
| | | AGGTACCTCTACCGAACCGTCTGAGGGCAGCGCACCAGGTACTTCTACCGAACC |
| | | GTCCGAGGGTAGCGCACCAGGTAGCCCAGCAGGTTCTCCTACCTCCACCGAGGA |
| | | AGGTACTTCTACCGAACCGTCCGAGGGTAGCGCACCAGGTACCTCTACTGAACC |
| | | TTCTGAGGGCAGCGCTCCAGGTACTTCTGAAAGCGCTACCCCGGAGTCCGGTCC |
| | | AGGTACTTCTACTGAACCGTCCGAAGGTAGCGCACCAGGTACTTCTGAAAGCGC |
| | | AACCCCTGAATCCGGTCCAGGTAGCGAACCGGCTACTTCTGGCTCTGAGACTCC |
| | | AGGTACTTCTACCGAACCGTCCGAAGGTAGCGCACCAGGTACTTCTACTGAACC |
| | | GTCTGAAGGTAGCGCACCAGGTACTTCTGAAAGCGCAACCCCGGAATCCGGCCC |
| | | AGGTACCTCTGAAAGCGCAACCCCGGAGTCCGGCCCAGGTAGCCCTGCTGGCTC |
| | | TCCAACCTCCACCGAAGAAGGTACCTCTGAAAGCGCAACCCCTGAATCCGGCCC |
| | | AGGTAGCGAACCGGCAACCTCCGGTTCTGAAACCCCAGGTACCTCTGAAAGCGC |
| | | TACTCCGGAGTCTGGCCCAGGTACCTCTACTGAACCGTCTGAGGGTAGCGCTCC |
| | | AGGTACTTCTACTGAACCGTCCGAAGGTAGCGCACCAGGTACTTCTACCGAACC |
| | | GTCCGAAGGCAGCGCTCCAGGTACCTCTACTGAACCTTCCGAGGGCAGCGCTCC |
| | | AGGTACCTCTACCGAACCTTCTGAAGGTAGCGCACCAGGTACTTCTACCGAACC |
| | | GTCCGAGGGTAGCGCACCAGGTAGCCCAGCAGGTTCTCCTACCTCCACCGAGGA |
| | | AGGTACTTCTACCGAACCGTCCGAGGGTAGCGCACCAGGTACCTCTGAAAGCGC |
| | | AACTCCTGAGTCTGGCCCAGGTAGCGAACCTGCTACCTCCGGCTCTGAGACTCC |
| | | AGGTACCTCTGAAAGCGCAACCCCGGAATCTGGTCCAGGTAGCGAACCTGCAAC |
| | | CTCTGGCTCTGAAACCCCAGGTACCTCTGAAAGCGCTACTCCTGAATCTGGCCC |
| | | AGGTACTTCTACTGAACCGTCCGAGGGCAGCGCACCAGGTACTTCTGAAAGCGC |
| | | TACTCCTGAGTCCGGCCCAGGTAGCCCGGCTGGCTCTCCGACTTCCACCGAGGA |
| | | AGGTAGCCCGGCTGGCTCTCCAACTTCTACTGAAGAAGGTAGCCCGGCAGGCTC |
| | | TCCGACCTCTACTGAGGAAGGTACTTCTGAAAGCGCAACCCCGGAGTCCGGCCC |
| | | AGGTACCTCTACCGAACCGTCTGAGGGCAGCGCACCA |
| AM875 | 115 | GGTACTTCTACTGAACCGTCTGAAGGCAGCGCACCAGGTAGCGAACCGGCTACT |
| | | TCCGGTTCTGAAACCCCAGGTAGCCCAGCAGGTTCTCCAACTTCTACTGAAGAA |
| | | GGTTCTACCAGCTCTACCGCAGAATCTCCTGGTCCAGGTACCTCTACTCCGGAA |
| | | AGCGGCTCTGCATCTCCAGGTTCTACTAGCGAATCTCCTTCTGGCACTGCACCAG |
| | | GTTCTACTAGCGAATCCCCGTCTGGTACTGCTCCAGGTACTTCTACTCCTGAAAG |
| | | CGGTTCCGCTTCTCCAGGTACCTCTACTCCGGAAAGCGGTTCTGCATCTCCAGGT |
| | | AGCGAACCGGCAACCTCCGGCTCTGAAACCCCAGGTACCTCTGAAAGCGCTACT |
| | | CCTGAATCCGGCCCAGGTAGCCCGGCAGGTTCTCCGACTTCCACTGAGGAAGGT |
| | | ACCTCTACTGAACCTTCTGAGGGCAGCGCTCCAGGTACTTCTGAAAGCGCTACC |
| | | CCGGAGTCCGGTCCAGGTACTTCTACTGAACCGTCCGAAGGTAGCGCACCAGGT |
| | | ACTTCTACCGAACCGTCCGAGGGTAGCGCACCAGGTAGCCCAGCAGGTTCTCCT |
| | | ACCTCCACCGAGGAAGGTACTTCTACCGAACCGTCCGAGGGTAGCGCACCAGGT |
| | | ACTTCTACCGAACCTTCCGAGGGCAGCGCACCAGGTACTTCTGAAAGCGCTACC |
| | | CCTGAGTCCGGCCCAGGTACTTCTGAAAGCGCTACTCCTGAATCCGGTCCAGGT |
| | | ACCTCTACTGAACCTTCCGAAGGCAGCGCTCCAGGTACCTCTACCGAACCGTCC |
| | | GAGGGCAGCGCACCAGGTACTTCTGAAAGCGCAACCCCTGAATCCGGTCCAGGT |
| | | ACTTCTACTGAACCTTCCGAAGGTAGCGCTCCAGGTAGCGAACCTGCTACTTCT |
| | | GGTTCTGAAACCCCAGGTAGCCCGGCTGGCTCTCCGACCTCCACCGAGGAAGGT |
| | | AGCTCTACCCCGTCTGGTGCTACTGGTTCTCCAGGTACTCCGGGCAGCGGTACTG |
| | | CTTCTTCCTCTCCAGGTAGCTCTACCCCTTCTGGTGCTACTGGCTCTCCAGGTAC |
| | | CTCTACCGAACCGTCCGAGGGTAGCGCACCAGGTACCTCTACTGAACCGTCTGA |
| | | GGGTAGCGCTCCAGGTAGCGAACCGGCAACCTCCGGTTCTGAAACTCCAGGTAG |
| | | CCCTGCTGGCTCTCCGACTTCTACTGAGGAAGGTAGCCCGGCTGGTTCTCCGACT |
| | | TCTACTGAGGAAGGTACTTCTACCGAACCTTCCGAAGGTAGCGCTCCAGGTGCA |
| | | AGCGCAAGCGGCGCGCCAAGCACGGGAGGTACTTCTGAAAGCGCTACTCCTGA |
| | | GTCCGGCCCAGGTAGCCCGGCTGGCTCTCCGACTTCCACCGAGGAAGGTAGCCC |
| | | GGCTGGCTCTCCAACTTCTACTGAAGAAGGTTCTACCAGCTCTACCGCTGAATCT |
| | | CCTGGCCCAGGTTCTACTAGCGAATCTCCGTCTGGCACCGCACCAGGTACTTCCC |
| | | CTAGCGGTGAATCTTCTACTGCACCAGGTACCCCTGGCAGCGGTACCGCTTCTTC |
| | | CTCTCCAGGTAGCTCTACCCCGTCTGGTGCTACTGGCTCTCCAGGTTCTAGCCCG |
| | | TCTGCATCTACCGGTACCGGCCCAGGTAGCGAACCGGCAACCTCCGGCTCTGAA |
| | | ACTCCAGGTACTTCTGAAAGCGCTACTCCGGAATCCGGCCCAGGTAGCGAACCG |
| | | GCTACTTCCGGCTCTGAAACCCCAGGTTCCACCAGCTCTACTGCAGAATCTCCG |
| | | GGCCCAGGTTCTACTAGCTCTACTGCAGAATCTCCGGGTCCAGGTACTTCTCCTA |
| | | GCGGCGAATCTTCTACCGCTCCAGGTAGCGAACCGGCAACCTCTGGCTCTGAAA |
| | | CTCCAGGTAGCGAACCTGCAACCTCCGGCTCTGAAACCCCAGGTACTTCTACTG |
| | | AACCTTCTGAGGGCAGCGCACCAGGTTCTACCAGCTCTACCGCAGAATCTCCTG |
| | | GTCCAGGTACCTCTACTCCGGAAAGCGGCTCTGCATCTCCAGGTTCTACTAGCG |
| | | AATCTCCTTCTGGCACTGCACCAGGTACTTCTACCGAACCGTCCGAAGGCAGCG |
| | | CTCCAGGTACCTCTACTGAACCTTCCGAGGGCAGCGCTCCAGGTACCTCTACCG |
| | | AACCTTCTGAAGGTAGCGCACCAGGTAGCTCTACTCCGTCTGGTGCAACCGGCT |
| | | CCCCAGGTTCTAGCCCGTCTGCTTCCACTGGTACTGGCCCAGGTGCTTCCCCGGG |
| | | CACCAGCTCTACTGGTTCTCCAGGTAGCGAACCTGCTACCTCCGGTTCTGAAACC |
| | | CCAGGTACCTCTGAAAGCGCAACTCCGGAGTCTGGTCCAGGTAGCCCTGCAGGT |
| | | TCTCCTACCTCCACTGAGGAAGGTAGCTCTACTCCGTCTGGTGCAACCGGCTCCC |
| | | CAGGTTCTAGCCCGTCTGCTTCCACTGGTACTGGCCCAGGTGCTTCCCCGGGCAC |
| | | CAGCTCTACTGGTTCTCCAGGTACCTCTGAAAGCGCTACTCCGGAGTCTGGCCC |
| | | AGGTACCTCTACTGAACCGTCTGAGGGTAGCGCTCCAGGTACTTCTACTGAACC |
| | | GTCCGAAGGTAGCGCACCA |
| AE864 | 116 | GGTAGCCCGGCTGGCTCTCCTACCTCTACTGAGGAAGGTACTTCTGAAAGCGCT |
| | | ACTCCTGAGTCTGGTCCAGGTACCTCTACTGAACCGTCCGAAGGTAGCGCTCCA |
| | | GGTAGCCCAGCAGGCTCTCCGACTTCCACTGAGGAAGGTACTTCTACTGAACCT |
| | | TCCGAAGGCAGCGCACCAGGTACCTCTACTGAACCTTCTGAGGGCAGCGCTCCA |
| | | GGTACTTCTGAAAGCGCTACCCCGGAATCTGGCCCAGGTAGCGAACCGGCTACT |
| | | TCTGGTTCTGAAACCCCAGGTAGCGAACCGGCTACCTCCGGTTCTGAAACTCCA |
| | | GGTAGCCCGGCAGGCTCTCCGACCTCTACTGAGGAAGGTACTTCTGAAAGCGCA |
| | | ACCCCGGAGTCCGGCCCAGGTACCTCTACCGAACCGTCTGAGGGCAGCGCACCA |
| | | GGTACTTCTACCGAACCGTCCGAGGGTAGCGCACCAGGTAGCCCAGCAGGTTCT |
| | | CCTACCTCCACCGAGGAAGGTACTTCTACCGAACCGTCCGAGGGTAGCGCACCA |
| | | GGTACCTCTACTGAACCTTCTGAGGGCAGCGCTCCAGGTACTTCTGAAAGCGCT |
| | | ACCCCGGAGTCCGGTCCAGGTACTTCTACTGAACCGTCCGAAGGTAGCGCACCA |
| | | GGTACTTCTGAAAGCGCAACCCCTGAATCCGGTCCAGGTAGCGAACCGGCTACT |
| | | TCTGGCTCTGAGACTCCAGGTACTTCTACCGAACCGTCCGAAGGTAGCGCACCA |
| | | GGTACTTCTACTGAACCGTCTGAAGGTAGCGCACCAGGTACTTCTGAAAGCGCA |
| | | ACCCCGGAATCCGGCCCAGGTACCTCTGAAAGCGCAACCCCGGAGTCCGGCCC |
| | | AGGTAGCCCTGCTGGCTCTCCAACCTCCACCGAAGAAGGTACCTCTGAAAGCGC |
| | | AACCCCTGAATCCGGCCCAGGTAGCGAACCGGCAACCTCCGGTTCTGAAACCCC |
| | | AGGTACCTCTGAAAGCGCTACTCCGGAGTCTGGCCCAGGTACCTCTACTGAACC |
| | | GTCTGAGGGTAGCGCTCCAGGTACTTCTACTGAACCGTCCGAAGGTAGCGCACC |
| | | AGGTACTTCTACCGAACCGTCCGAAGGCAGCGCTCCAGGTACCTCTACTGAACC |
| | | TTCCGAGGGCAGCGCTCCAGGTACCTCTACCGAACCTTCTGAAGGTAGCGCACC |
| | | AGGTACTTCTACCGAACCGTCCGAGGGTAGCGCACCAGGTAGCCCAGCAGGTTC |
| | | TCCTACCTCCACCGAGGAAGGTACTTCTACCGAACCGTCCGAGGGTAGCGCACC |
| | | AGGTACCTCTGAAAGCGCAACTCCTGAGTCTGGCCCAGGTAGCGAACCTGCTAC |
| | | CTCCGGCTCTGAGACTCCAGGTACCTCTGAAAGCGCAACCCCGGAATCTGGTCC |
| | | AGGTAGCGAACCTGCAACCTCTGGCTCTGAAACCCCAGGTACCTCTGAAAGCGC |
| | | TACTCCTGAATCTGGCCCAGGTACTTCTACTGAACCGTCCGAGGGCAGCGCACC |
| | | AGGTACTTCTGAAAGCGCTACTCCTGAGTCCGGCCCAGGTAGCCCGGCTGGCTC |
| | | TCCGACTTCCACCGAGGAAGGTAGCCCGGCTGGCTCTCCAACTTCTACTGAAGA |
| | | AGGTAGCCCGGCAGGCTCTCCGACCTCTACTGAGGAAGGTACTTCTGAAAGCGC |
| | | AACCCCGGAGTCCGGCCCAGGTACCTCTACCGAACCGTCTGAGGGCAGCGCACC |
| | | AGGTACCTCTGAAAGCGCAACTCCTGAGTCTGGCCCAGGTAGCGAACCTGCTAC |
| | | CTCCGGCTCTGAGACTCCAGGTACCTCTGAAAGCGCAACCCCGGAATCTGGTCC |
| | | AGGTAGCGAACCTGCAACCTCTGGCTCTGAAACCCCAGGTACCTCTGAAAGCGC |
| | | TACTCCTGAATCTGGCCCAGGTACTTCTACTGAACCGTCCGAGGGCAGCGCACC |
| | | AGGTAGCCCTGCTGGCTCTCCAACCTCCACCGAAGAAGGTACCTCTGAAAGCGC |
| | | AACCCCTGAATCCGGCCCAGGTAGCGAACCGGCAACCTCCGGTTCTGAAACCCC |
| | | AGGTACTTCTGAAAGCGCTACTCCTGAGTCCGGCCCAGGTAGCCCGGCTGGCTC |
| | | TCCGACTTCCACCGAGGAAGGTAGCCCGGCTGGCTCTCCAACTTCTACTGAAGA |
| | | AGGTACTTCTACCGAACCTTCCGAGGGCAGCGCACCAGGTACTTCTGAAAGCGC |
| | | TACCCCTGAGTCCGGCCCAGGTACTTCTGAAAGCGCTACTCCTGAATCCGGTCC |
| | | AGGTACTTCTGAAAGCGCTACCCCGGAATCTGGCCCAGGTAGCGAACCGGCTAC |
| | | TTCTGGTTCTGAAACCCCAGGTAGCGAACCGGCTACCTCCGGTTCTGAAACTCC |
| | | AGGTAGCCCAGCAGGCTCTCCGACTTCCACTGAGGAAGGTACTTCTACTGAACC |
| | | TTCCGAAGGCAGCGCACCAGGTACCTCTACTGAACCTTCTGAGGGCAGCGCTCC |
| | | AGGTAGCGAACCTGCAACCTCTGGCTCTGAAACCCCAGGTACCTCTGAAAGCGC |
| | | TACTCCTGAATCTGGCCCAGGTACTTCTACTGAACCGTCCGAGGGCAGCGCACCA |
| AF864 | 117 | GGTTCTACCAGCGAATCTCCTTCTGGCACCGCTCCAGGTACCTCTCCTAGCGGCG |
| | | AATCTTCTACCGCTCCAGGTTCTACTAGCGAATCTCCTTCTGGCACTGCACCAGG |
| | | TTCTACTAGCGAATCCCCGTCTGGTACTGCTCCAGGTACTTCTACTCCTGAAAGC |
| | | GGTTCCGCTTCTCCAGGTACCTCTACTCCGGAAAGCGGTTCTGCATCTCCAGGTT |
| | | CTACCAGCGAATCTCCTTCTGGCACCGCTCCAGGTTCTACTAGCGAATCCCCGTC |
| | | TGGTACCGCACCAGGTACTTCTCCTAGCGGCGAATCTTCTACCGCACCAGGTTCT |
| | | ACTAGCGAATCTCCGTCTGGCACTGCTCCAGGTACTTCTCCTAGCGGTGAATCTT |
| | | CTACCGCTCCAGGTACTTCCCCTAGCGGCGAATCTTCTACCGCTCCAGGTTCTAC |
| | | TAGCTCTACTGCAGAATCTCCGGGCCCAGGTACCTCTCCTAGCGGTGAATCTTCT |
| | | ACCGCTCCAGGTACTTCTCCGAGCGGTGAATCTTCTACCGCTCCAGGTTCTACTA |
| | | GCTCTACTGCAGAATCTCCTGGCCCAGGTACCTCTACTCCGGAAAGCGGCTCTG |
| | | CATCTCCAGGTACTTCTACCCCTGAAAGCGGTTCTGCATCTCCAGGTTCTACTAG |
| | | CGAATCTCCTTCTGGCACTGCACCAGGTTCTACCAGCGAATCTCCGTCTGGCACT |
| | | GCACCAGGTACCTCTACCCCTGAAAGCGGTTCCGCTTCTCCAGGTTCTACCAGCT |
| | | CTACCGCAGAATCTCCTGGTCCAGGTACCTCTACTCCGGAAAGCGGCTCTGCAT |
| | | CTCCAGGTTCTACTAGCGAATCTCCTTCTGGCACTGCACCAGGTACTTCTCCGAG |
| | | CGGTGAATCTTCTACCGCACCAGGTTCTACTAGCTCTACCGCTGAATCTCCGGGC |
| | | CCAGGTACTTCTCCGAGCGGTGAATCTTCTACTGCTCCAGGTACCTCTACTCCTG |
| | | AAAGCGGTTCTGCATCTCCAGGTTCCACTAGCTCTACCGCAGAATCTCCGGGCC |
| | | CAGGTTCTACTAGCTCTACTGCTGAATCTCCTGGCCCAGGTTCTACTAGCTCTAC |
| | | TGCTGAATCTCCGGGTCCAGGTTCTACCAGCTCTACTGCTGAATCTCCTGGTCCA |
| | | GGTACCTCCCCGAGCGGTGAATCTTCTACTGCACCAGGTTCTACTAGCGAATCTC |
| | | CTTCTGGCACTGCACCAGGTTCTACCAGCGAATCTCCGTCTGGCACTGCACCAG |
| | | GTACCTCTACCCCTGAAAGCGGTCCXXXXXXXXXXXXTGCAAGCGCAAGCGGC |
| | | GCGCCAAGCACGGGAXXXXXXXXTAGCGAATCTCCTTCTGGTACCGCTCCAGGT |
| | | TCTACCAGCGAATCCCCGTCTGGTACTGCTCCAGGTTCTACCAGCGAATCTCCTT |
| | | CTGGTACTGCACCAGGTTCTACTAGCGAATCTCCTTCTGGTACCGCTCCAGGTTC |
| | | TACCAGCGAATCCCCGTCTGGTACTGCTCCAGGTTCTACCAGCGAATCTCCTTCT |
| | | GGTACTGCACCAGGTACTTCTACTCCGGAAAGCGGTTCCGCATCTCCAGGTACT |
| | | TCTCCTAGCGGTGAATCTTCTACTGCTCCAGGTACCTCTCCTAGCGGCGAATCTT |
| | | CTACTGCTCCAGGTTCTACCAGCTCTACTGCTGAATCTCCGGGTCCAGGTACTTC |
| | | CCCGAGCGGTGAATCTTCTACTGCACCAGGTACTTCTACTCCGGAAAGCGGTTC |
| | | CGCTTCTCCAGGTTCTACCAGCGAATCTCCTTCTGGCACCGCTCCAGGTTCTACT |
| | | AGCGAATCCCCGTCTGGTACCGCACCAGGTACTTCTCCTAGCGGCGAATCTTCT |
| | | ACCGCACCAGGTTCTACTAGCGAATCCCCGTCTGGTACCGCACCAGGTACTTCT |
| | | ACCCCGGAAAGCGGCTCTGCTTCTCCAGGTACTTCTACCCCGGAAAGCGGCTCC |
| | | GCATCTCCAGGTTCTACTAGCGAATCTCCTTCTGGTACCGCTCCAGGTACTTCTA |
| | | CCCCTGAAAGCGGCTCCGCTTCTCCAGGTTCCACTAGCTCTACCGCTGAATCTCC |
| | | GGGTCCAGGTTCTACCAGCGAATCTCCTTCTGGCACCGCTCCAGGTTCTACTAGC |
| | | GAATCCCCGTCTGGTACCGCACCAGGTACTTCTCCTAGCGGCGAATCTTCTACCG |
| | | CACCAGGTTCTACCAGCTCTACTGCTGAATCTCCGGGTCCAGGTACTTCCCCGAG |
| | | CGGTGAATCTTCTACTGCACCAGGTACTTCTACTCCGGAAAGCGGTTCCGCTTCT |
| | | CCAGGTACCTCCCCTAGCGGCGAATCTTCTACTGCTCCAGGTACCTCTCCTAGCG |
| | | GCGAATCTTCTACCGCTCCAGGTACCTCCCCTAGCGGTGAATCTTCTACCGCACC |
| | | AGGTTCTACTAGCTCTACTGCTGAATCTCCGGGTCCAGGTTCTACCAGCTCTACT |
| | | GCTGAATCTCCTGGTCCAGGTACCTCCCCGAGCGGTGAATCTTCTACTGCACCA |
| | | GGTTCTAGCCCTTCTGCTTCCACCGGTACCGGCCCAGGTAGCTCTACTCCGTCTG |
| | | GTGCAACTGGCTCTCCAGGTAGCTCTACTCCGTCTGGTGCAACCGGCTCCCCA |
| | | XXXX was inserted in two areas where no sequence |
| | | information is available. |
| AG864 | 118 | GGTGCTTCCCCGGGCACCAGCTCTACTGGTTCTCCAGGTTCTAGCCCGTCTGCTT |
| | | CTACTGGTACTGGTCCAGGTTCTAGCCCTTCTGCTTCCACTGGTACTGGTCCAGG |
| | | TACCCCGGGTAGCGGTACCGCTTCTTCTTCTCCAGGTAGCTCTACTCCGTCTGGT |
| | | GCTACCGGCTCTCCAGGTTCTAACCCTTCTGCATCCACCGGTACCGGCCCAGGTG |
| | | CTTCTCCGGGCACCAGCTCTACTGGTTCTCCAGGTACCCCGGGCAGCGGTACCG |
| | | CATCTTCTTCTCCAGGTAGCTCTACTCCTTCTGGTGCAACTGGTTCTCCAGGTAC |
| | | TCCTGGCAGCGGTACCGCTTCTTCTTCTCCAGGTGCTTCTCCTGGTACTAGCTCT |
| | | ACTGGTTCTCCAGGTGCTTCTCCGGGCACTAGCTCTACTGGTTCTCCAGGTACCC |
| | | CGGGTAGCGGTACTGCTTCTTCCTCTCCAGGTAGCTCTACCCCTTCTGGTGCAAC |
| | | CGGCTCTCCAGGTGCTTCTCCGGGCACCAGCTCTACCGGTTCTCCAGGTACCCCG |
| | | GGTAGCGGTACCGCTTCTTCTTCTCCAGGTAGCTCTACTCCGTCTGGTGCTACCG |
| | | GCTCTCCAGGTTCTAACCCTTCTGCATCCACCGGTACCGGCCCAGGTTCTAGCCC |
| | | TTCTGCTTCCACCGGTACTGGCCCAGGTAGCTCTACCCCTTCTGGTGCTACCGGC |
| | | TCCCCAGGTAGCTCTACTCCTTCTGGTGCAACTGGCTCTCCAGGTGCATCTCCGG |
| | | GCACTAGCTCTACTGGTTCTCCAGGTGCATCCCCTGGCACTAGCTCTACTGGTTC |
| | | TCCAGGTGCTTCTCCTGGTACCAGCTCTACTGGTTCTCCAGGTACTCCTGGCAGC |
| | | GGTACCGCTTCTTCTTCTCCAGGTGCTTCTCCTGGTACTAGCTCTACTGGTTCTCC |
| | | AGGTGCTTCTCCGGGCACTAGCTCTACTGGTTCTCCAGGTGCTTCCCCGGGCACT |
| | | AGCTCTACCGGTTCTCCAGGTTCTAGCCCTTCTGCATCTACTGGTACTGGCCCAG |
| | | GTACTCCGGGCAGCGGTACTGCTTCTTCCTCTCCAGGTGCATCTCCGGGCACTAG |
| | | CTCTACTGGTTCTCCAGGTGCATCCCCTGGCACTAGCTCTACTGGTTCTCCAGGT |
| | | GCTTCTCCTGGTACCAGCTCTACTGGTTCTCCAGGTAGCTCTACTCCGTCTGGTG |
| | | CAACCGGTTCCCCAGGTAGCTCTACTCCTTCTGGTGCTACTGGCTCCCCAGGTGC |
| | | ATCCCCTGGCACCAGCTCTACCGGTTCTCCAGGTACCCCGGGCAGCGGTACCGC |
| | | ATCTTCCTCTCCAGGTAGCTCTACCCCGTCTGGTGCTACCGGTTCCCCAGGTAGC |
| | | TCTACCCCGTCTGGTGCAACCGGCTCCCCAGGTAGCTCTACTCCGTCTGGTGCAA |
| | | CCGGCTCCCCAGGTTCTAGCCCGTCTGCTTCCACTGGTACTGGCCCAGGTGCTTC |
| | | CCCGGGCACCAGCTCTACTGGTTCTCCAGGTGCATCCCCGGGTACCAGCTCTAC |
| | | CGGTTCTCCAGGTACTCCTGGCAGCGGTACTGCATCTTCCTCTCCAGGTGCTTCT |
| | | CCGGGCACCAGCTCTACTGGTTCTCCAGGTGCATCTCCGGGCACTAGCTCTACTG |
| | | GTTCTCCAGGTGCATCCCCTGGCACTAGCTCTACTGGTTCTCCAGGTGCTTCTCC |
| | | TGGTACCAGCTCTACTGGTTCTCCAGGTACCCCTGGTAGCGGTACTGCTTCTTCC |
| | | TCTCCAGGTAGCTCTACTCCGTCTGGTGCTACCGGTTCTCCAGGTACCCCGGGTA |
| | | GCGGTACCGCATCTTCTTCTCCAGGTAGCTCTACCCCGTCTGGTGCTACTGGTTC |
| | | TCCAGGTACTCCGGGCAGCGGTACTGCTTCTTCCTCTCCAGGTAGCTCTACCCCT |
| | | TCTGGTGCTACTGGCTCTCCAGGTAGCTCTACCCCGTCTGGTGCTACTGGCTCCC |
| | | CAGGTTCTAGCCCTTCTGCATCCACCGGTACCGGTCCAGGTTCTAGCCCGTCTGC |
| | | ATCTACTGGTACTGGTCCAGGTGCATCCCCGGGCACTAGCTCTACCGGTTCTCCA |
| | | GGTACTCCTGGTAGCGGTACTGCTTCTTCTTCTCCAGGTAGCTCTACTCCTTCTG |
| | | GTGCTACTGGTTCTCCAGGTTCTAGCCCTTCTGCATCCACCGGTACCGGCCCAGG |
| | | TTCTAGCCCGTCTGCTTCTACCGGTACTGGTCCAGGTGCTTCTCCGGGTACTAGC |
| | | TCTACTGGTTCTCCAGGTGCATCTCCTGGTACTAGCTCTACTGGTTCTCCAGGTA |
| | | GCTCTACTCCGTCTGGTGCAACCGGCTCTCCAGGTTCTAGCCCTTCTGCATCTAC |
| | | CGGTACTGGTCCAGGTGCATCCCCTGGTACCAGCTCTACCGGTTCTCCAGGTTCT |
| | | AGCCCTTCTGCTTCTACCGGTACCGGTCCAGGTACCCCTGGCAGCGGTACCGCA |
| | | TCTTCCTCTCCAGGTAGCTCTACTCCGTCTGGTGCAACCGGTTCCCCAGGTAGCT |
| | | CTACTCCTTCTGGTGCTACTGGCTCCCCAGGTGCATCCCCTGGCACCAGCTCTAC |
| | | CGGTTCTCCA |
| AM923 | 119 | ATGGCTGAACCTGCTGGCTCTCCAACCTCCACTGAGGAAGGTGCATCCCCGGGC |
| | | ACCAGCTCTACCGGTTCTCCAGGTAGCTCTACCCCGTCTGGTGCTACCGGCTCTC |
| | | CAGGTAGCTCTACCCCGTCTGGTGCTACTGGCTCTCCAGGTACTTCTACTGAACC |
| | | GTCTGAAGGCAGCGCACCAGGTAGCGAACCGGCTACTTCCGGTTCTGAAACCCC |
| | | AGGTAGCCCAGCAGGTTCTCCAACTTCTACTGAAGAAGGTTCTACCAGCTCTAC |
| | | CGCAGAATCTCCTGGTCCAGGTACCTCTACTCCGGAAAGCGGCTCTGCATCTCC |
| | | AGGTTCTACTAGCGAATCTCCTTCTGGCACTGCACCAGGTTCTACTAGCGAATCC |
| | | CCGTCTGGTACTGCTCCAGGTACTTCTACTCCTGAAAGCGGTTCCGCTTCTCCAG |
| | | GTACCTCTACTCCGGAAAGCGGTTCTGCATCTCCAGGTAGCGAACCGGCAACCT |
| | | CCGGCTCTGAAACCCCAGGTACCTCTGAAAGCGCTACTCCTGAATCCGGCCCAG |
| | | GTAGCCCGGCAGGTTCTCCGACTTCCACTGAGGAAGGTACCTCTACTGAACCTT |
| | | CTGAGGGCAGCGCTCCAGGTACTTCTGAAAGCGCTACCCCGGAGTCCGGTCCAG |
| | | GTACTTCTACTGAACCGTCCGAAGGTAGCGCACCAGGTACTTCTACCGAACCGT |
| | | CCGAGGGTAGCGCACCAGGTAGCCCAGCAGGTTCTCCTACCTCCACCGAGGAAG |
| | | GTACTTCTACCGAACCGTCCGAGGGTAGCGCACCAGGTACTTCTACCGAACCTT |
| | | CCGAGGGCAGCGCACCAGGTACTTCTGAAAGCGCTACCCCTGAGTCCGGCCCAG |
| | | GTACTTCTGAAAGCGCTACTCCTGAATCCGGTCCAGGTACCTCTACTGAACCTTC |
| | | CGAAGGCAGCGCTCCAGGTACCTCTACCGAACCGTCCGAGGGCAGCGCACCAG |
| | | GTACTTCTGAAAGCGCAACCCCTGAATCCGGTCCAGGTACTTCTACTGAACCTTC |
| | | CGAAGGTAGCGCTCCAGGTAGCGAACCTGCTACTTCTGGTTCTGAAACCCCAGG |
| | | TAGCCCGGCTGGCTCTCCGACCTCCACCGAGGAAGGTAGCTCTACCCCGTCTGG |
| | | TGCTACTGGTTCTCCAGGTACTCCGGGCAGCGGTACTGCTTCTTCCTCTCCAGGT |
| | | AGCTCTACCCCTTCTGGTGCTACTGGCTCTCCAGGTACCTCTACCGAACCGTCCG |
| | | AGGGTAGCGCACCAGGTACCTCTACTGAACCGTCTGAGGGTAGCGCTCCAGGTA |
| | | GCGAACCGGCAACCTCCGGTTCTGAAACTCCAGGTAGCCCTGCTGGCTCTCCGA |
| | | CTTCTACTGAGGAAGGTAGCCCGGCTGGTTCTCCGACTTCTACTGAGGAAGGTA |
| | | CTTCTACCGAACCTTCCGAAGGTAGCGCTCCAGGTGCAAGCGCAAGCGGCGCGC |
| | | CAAGCACGGGAGGTACTTCTGAAAGCGCTACTCCTGAGTCCGGCCCAGGTAGCC |
| | | CGGCTGGCTCTCCGACTTCCACCGAGGAAGGTAGCCCGGCTGGCTCTCCAACTT |
| | | CTACTGAAGAAGGTTCTACCAGCTCTACCGCTGAATCTCCTGGCCCAGGTTCTAC |
| | | TAGCGAATCTCCGTCTGGCACCGCACCAGGTACTTCCCCTAGCGGTGAATCTTCT |
| | | ACTGCACCAGGTACCCCTGGCAGCGGTACCGCTTCTTCCTCTCCAGGTAGCTCTA |
| | | CCCCGTCTGGTGCTACTGGCTCTCCAGGTTCTAGCCCGTCTGCATCTACCGGTAC |
| | | CGGCCCAGGTAGCGAACCGGCAACCTCCGGCTCTGAAACTCCAGGTACTTCTGA |
| | | AAGCGCTACTCCGGAATCCGGCCCAGGTAGCGAACCGGCTACTTCCGGCTCTGA |
| | | AACCCCAGGTTCCACCAGCTCTACTGCAGAATCTCCGGGCCCAGGTTCTACTAG |
| | | CTCTACTGCAGAATCTCCGGGTCCAGGTACTTCTCCTAGCGGCGAATCTTCTACC |
| | | GCTCCAGGTAGCGAACCGGCAACCTCTGGCTCTGAAACTCCAGGTAGCGAACCT |
| | | GCAACCTCCGGCTCTGAAACCCCAGGTACTTCTACTGAACCTTCTGAGGGCAGC |
| | | GCACCAGGTTCTACCAGCTCTACCGCAGAATCTCCTGGTCCAGGTACCTCTACTC |
| | | CGGAAAGCGGCTCTGCATCTCCAGGTTCTACTAGCGAATCTCCTTCTGGCACTGC |
| | | ACCAGGTACTTCTACCGAACCGTCCGAAGGCAGCGCTCCAGGTACCTCTACTGA |
| | | ACCTTCCGAGGGCAGCGCTCCAGGTACCTCTACCGAACCTTCTGAAGGTAGCGC |
| | | ACCAGGTAGCTCTACTCCGTCTGGTGCAACCGGCTCCCCAGGTTCTAGCCCGTCT |
| | | GCTTCCACTGGTACTGGCCCAGGTGCTTCCCCGGGCACCAGCTCTACTGGTTCTC |
| | | CAGGTAGCGAACCTGCTACCTCCGGTTCTGAAACCCCAGGTACCTCTGAAAGCG |
| | | CAACTCCGGAGTCTGGTCCAGGTAGCCCTGCAGGTTCTCCTACCTCCACTGAGG |
| | | AAGGTAGCTCTACTCCGTCTGGTGCAACCGGCTCCCCAGGTTCTAGCCCGTCTGC |
| | | TTCCACTGGTACTGGCCCAGGTGCTTCCCCGGGCACCAGCTCTACTGGTTCTCCA |
| | | GGTACCTCTGAAAGCGCTACTCCGGAGTCTGGCCCAGGTACCTCTACTGAACCG |
| | | TCTGAGGGTAGCGCTCCAGGTACTTCTACTGAACCGTCCGAAGGTAGCGCACCA |
| AE912 | 120 | ATGGCTGAACCTGCTGGCTCTCCAACCTCCACTGAGGAAGGTACCCCGGGTAGC |
| | | GGTACTGCTTCTTCCTCTCCAGGTAGCTCTACCCCTTCTGGTGCAACCGGCTCTC |
| | | CAGGTGCTTCTCCGGGCACCAGCTCTACCGGTTCTCCAGGTAGCCCGGCTGGCT |
| | | CTCCTACCTCTACTGAGGAAGGTACTTCTGAAAGCGCTACTCCTGAGTCTGGTCC |
| | | AGGTACCTCTACTGAACCGTCCGAAGGTAGCGCTCCAGGTAGCCCAGCAGGCTC |
| | | TCCGACTTCCACTGAGGAAGGTACTTCTACTGAACCTTCCGAAGGCAGCGCACC |
| | | AGGTACCTCTACTGAACCTTCTGAGGGCAGCGCTCCAGGTACTTCTGAAAGCGC |
| | | TACCCCGGAATCTGGCCCAGGTAGCGAACCGGCTACTTCTGGTTCTGAAACCCC |
| | | AGGTAGCGAACCGGCTACCTCCGGTTCTGAAACTCCAGGTAGCCCGGCAGGCTC |
| | | TCCGACCTCTACTGAGGAAGGTACTTCTGAAAGCGCAACCCCGGAGTCCGGCCC |
| | | AGGTACCTCTACCGAACCGTCTGAGGGCAGCGCACCAGGTACTTCTACCGAACC |
| | | GTCCGAGGGTAGCGCACCAGGTAGCCCAGCAGGTTCTCCTACCTCCACCGAGGA |
| | | AGGTACTTCTACCGAACCGTCCGAGGGTAGCGCACCAGGTACCTCTACTGAACC |
| | | TTCTGAGGGCAGCGCTCCAGGTACTTCTGAAAGCGCTACCCCGGAGTCCGGTCC |
| | | AGGTACTTCTACTGAACCGTCCGAAGGTAGCGCACCAGGTACTTCTGAAAGCGC |
| | | AACCCCTGAATCCGGTCCAGGTAGCGAACCGGCTACTTCTGGCTCTGAGACTCC |
| | | AGGTACTTCTACCGAACCGTCCGAAGGTAGCGCACCAGGTACTTCTACTGAACC |
| | | GTCTGAAGGTAGCGCACCAGGTACTTCTGAAAGCGCAACCCCGGAATCCGGCCC |
| | | AGGTACCTCTGAAAGCGCAACCCCGGAGTCCGGCCCAGGTAGCCCTGCTGGCTC |
| | | TCCAACCTCCACCGAAGAAGGTACCTCTGAAAGCGCAACCCCTGAATCCGGCCC |
| | | AGGTAGCGAACCGGCAACCTCCGGTTCTGAAACCCCAGGTACCTCTGAAAGCGC |
| | | TACTCCGGAGTCTGGCCCAGGTACCTCTACTGAACCGTCTGAGGGTAGCGCTCC |
| | | AGGTACTTCTACTGAACCGTCCGAAGGTAGCGCACCAGGTACTTCTACCGAACC |
| | | GTCCGAAGGCAGCGCTCCAGGTACCTCTACTGAACCTTCCGAGGGCAGCGCTCC |
| | | AGGTACCTCTACCGAACCTTCTGAAGGTAGCGCACCAGGTACTTCTACCGAACC |
| | | GTCCGAGGGTAGCGCACCAGGTAGCCCAGCAGGTTCTCCTACCTCCACCGAGGA |
| | | AGGTACTTCTACCGAACCGTCCGAGGGTAGCGCACCAGGTACCTCTGAAAGCGC |
| | | AACTCCTGAGTCTGGCCCAGGTAGCGAACCTGCTACCTCCGGCTCTGAGACTCC |
| | | AGGTACCTCTGAAAGCGCAACCCCGGAATCTGGTCCAGGTAGCGAACCTGCAAC |
| | | CTCTGGCTCTGAAACCCCAGGTACCTCTGAAAGCGCTACTCCTGAATCTGGCCC |
| | | AGGTACTTCTACTGAACCGTCCGAGGGCAGCGCACCAGGTACTTCTGAAAGCGC |
| | | TACTCCTGAGTCCGGCCCAGGTAGCCCGGCTGGCTCTCCGACTTCCACCGAGGA |
| | | AGGTAGCCCGGCTGGCTCTCCAACTTCTACTGAAGAAGGTAGCCCGGCAGGCTC |
| | | TCCGACCTCTACTGAGGAAGGTACTTCTGAAAGCGCAACCCCGGAGTCCGGCCC |
| | | AGGTACCTCTACCGAACCGTCTGAGGGCAGCGCACCAGGTACCTCTGAAAGCGC |
| | | AACTCCTGAGTCTGGCCCAGGTAGCGAACCTGCTACCTCCGGCTCTGAGACTCC |
| | | AGGTACCTCTGAAAGCGCAACCCCGGAATCTGGTCCAGGTAGCGAACCTGCAAC |
| | | CTCTGGCTCTGAAACCCCAGGTACCTCTGAAAGCGCTACTCCTGAATCTGGCCC |
| | | AGGTACTTCTACTGAACCGTCCGAGGGCAGCGCACCAGGTAGCCCTGCTGGCTC |
| | | TCCAACCTCCACCGAAGAAGGTACCTCTGAAAGCGCAACCCCTGAATCCGGCCC |
| | | AGGTAGCGAACCGGCAACCTCCGGTTCTGAAACCCCAGGTACTTCTGAAAGCGC |
| | | TACTCCTGAGTCCGGCCCAGGTAGCCCGGCTGGCTCTCCGACTTCCACCGAGGA |
| | | AGGTAGCCCGGCTGGCTCTCCAACTTCTACTGAAGAAGGTACTTCTACCGAACC |
| | | TTCCGAGGGCAGCGCACCAGGTACTTCTGAAAGCGCTACCCCTGAGTCCGGCCC |
| | | AGGTACTTCTGAAAGCGCTACTCCTGAATCCGGTCCAGGTACTTCTGAAAGCGC |
| | | TACCCCGGAATCTGGCCCAGGTAGCGAACCGGCTACTTCTGGTTCTGAAACCCC |
| | | AGGTAGCGAACCGGCTACCTCCGGTTCTGAAACTCCAGGTAGCCCAGCAGGCTC |
| | | TCCGACTTCCACTGAGGAAGGTACTTCTACTGAACCTTCCGAAGGCAGCGCACC |
| | | AGGTACCTCTACTGAACCTTCTGAGGGCAGCGCTCCAGGTAGCGAACCTGCAAC |
| | | CTCTGGCTCTGAAACCCCAGGTACCTCTGAAAGCGCTACTCCTGAATCTGGCCC |
| | | AGGTACTTCTACTGAACCGTCCGAGGGCAGCGCACCA |
| AM1318 | 121 | GGTACTTCTACTGAACCGTCTGAAGGCAGCGCACCAGGTAGCGAACCGGCTACT |
| | | TCCGGTTCTGAAACCCCAGGTAGCCCAGCAGGTTCTCCAACTTCTACTGAAGAA |
| | | GGTTCTACCAGCTCTACCGCAGAATCTCCTGGTCCAGGTACCTCTACTCCGGAA |
| | | AGCGGCTCTGCATCTCCAGGTTCTACTAGCGAATCTCCTTCTGGCACTGCACCAG |
| | | GTTCTACTAGCGAATCCCCGTCTGGTACTGCTCCAGGTACTTCTACTCCTGAAAG |
| | | CGGTTCCGCTTCTCCAGGTACCTCTACTCCGGAAAGCGGTTCTGCATCTCCAGGT |
| | | AGCGAACCGGCAACCTCCGGCTCTGAAACCCCAGGTACCTCTGAAAGCGCTACT |
| | | CCTGAATCCGGCCCAGGTAGCCCGGCAGGTTCTCCGACTTCCACTGAGGAAGGT |
| | | ACCTCTACTGAACCTTCTGAGGGCAGCGCTCCAGGTACTTCTGAAAGCGCTACC |
| | | CCGGAGTCCGGTCCAGGTACTTCTACTGAACCGTCCGAAGGTAGCGCACCAGGT |
| | | ACTTCTACCGAACCGTCCGAGGGTAGCGCACCAGGTAGCCCAGCAGGTTCTCCT |
| | | ACCTCCACCGAGGAAGGTACTTCTACCGAACCGTCCGAGGGTAGCGCACCAGGT |
| | | ACTTCTACCGAACCTTCCGAGGGCAGCGCACCAGGTACTTCTGAAAGCGCTACC |
| | | CCTGAGTCCGGCCCAGGTACTTCTGAAAGCGCTACTCCTGAATCCGGTCCAGGT |
| | | ACCTCTACTGAACCTTCCGAAGGCAGCGCTCCAGGTACCTCTACCGAACCGTCC |
| | | GAGGGCAGCGCACCAGGTACTTCTGAAAGCGCAACCCCTGAATCCGGTCCAGGT |
| | | ACTTCTACTGAACCTTCCGAAGGTAGCGCTCCAGGTAGCGAACCTGCTACTTCT |
| | | GGTTCTGAAACCCCAGGTAGCCCGGCTGGCTCTCCGACCTCCACCGAGGAAGGT |
| | | AGCTCTACCCCGTCTGGTGCTACTGGTTCTCCAGGTACTCCGGGCAGCGGTACTG |
| | | CTTCTTCCTCTCCAGGTAGCTCTACCCCTTCTGGTGCTACTGGCTCTCCAGGTAC |
| | | CTCTACCGAACCGTCCGAGGGTAGCGCACCAGGTACCTCTACTGAACCGTCTGA |
| | | GGGTAGCGCTCCAGGTAGCGAACCGGCAACCTCCGGTTCTGAAACTCCAGGTAG |
| | | CCCTGCTGGCTCTCCGACTTCTACTGAGGAAGGTAGCCCGGCTGGTTCTCCGACT |
| | | TCTACTGAGGAAGGTACTTCTACCGAACCTTCCGAAGGTAGCGCTCCAGGTCCA |
| | | GAACCAACGGGGCCGGCCCCAAGCGGAGGTAGCGAACCGGCAACCTCCGGCTC |
| | | TGAAACCCCAGGTACCTCTGAAAGCGCTACTCCTGAATCCGGCCCAGGTAGCCC |
| | | GGCAGGTTCTCCGACTTCCACTGAGGAAGGTACTTCTGAAAGCGCTACTCCTGA |
| | | GTCCGGCCCAGGTAGCCCGGCTGGCTCTCCGACTTCCACCGAGGAAGGTAGCCC |
| | | GGCTGGCTCTCCAACTTCTACTGAAGAAGGTACTTCTGAAAGCGCTACTCCTGA |
| | | GTCCGGCCCAGGTAGCCCGGCTGGCTCTCCGACTTCCACCGAGGAAGGTAGCCC |
| | | GGCTGGCTCTCCAACTTCTACTGAAGAAGGTTCTACCAGCTCTACCGCTGAATCT |
| | | CCTGGCCCAGGTTCTACTAGCGAATCTCCGTCTGGCACCGCACCAGGTACTTCCC |
| | | CTAGCGGTGAATCTTCTACTGCACCAGGTTCTACCAGCGAATCTCCTTCTGGCAC |
| | | CGCTCCAGGTTCTACTAGCGAATCCCCGTCTGGTACCGCACCAGGTACTTCTCCT |
| | | AGCGGCGAATCTTCTACCGCACCAGGTACTTCTACCGAACCTTCCGAGGGCAGC |
| | | GCACCAGGTACTTCTGAAAGCGCTACCCCTGAGTCCGGCCCAGGTACTTCTGAA |
| | | AGCGCTACTCCTGAATCCGGTCCAGGTAGCGAACCGGCAACCTCTGGCTCTGAA |
| | | ACCCCAGGTACCTCTGAAAGCGCTACTCCGGAATCTGGTCCAGGTACTTCTGAA |
| | | AGCGCTACTCCGGAATCCGGTCCAGGTACCTCTACTGAACCTTCTGAGGGCAGC |
| | | GCTCCAGGTACTTCTGAAAGCGCTACCCCGGAGTCCGGTCCAGGTACTTCTACT |
| | | GAACCGTCCGAAGGTAGCGCACCAGGTACCTCCCCTAGCGGCGAATCTTCTACT |
| | | GCTCCAGGTACCTCTCCTAGCGGCGAATCTTCTACCGCTCCAGGTACCTCCCCTA |
| | | GCGGTGAATCTTCTACCGCACCAGGTACTTCTACCGAACCGTCCGAGGGTAGCG |
| | | CACCAGGTAGCCCAGCAGGTTCTCCTACCTCCACCGAGGAAGGTACTTCTACCG |
| | | AACCGTCCGAGGGTAGCGCACCAGGTTCTAGCCCTTCTGCTTCCACCGGTACCG |
| | | GCCCAGGTAGCTCTACTCCGTCTGGTGCAACTGGCTCTCCAGGTAGCTCTACTCC |
| | | GTCTGGTGCAACCGGCTCCCCAGGTAGCTCTACCCCGTCTGGTGCTACCGGCTCT |
| | | CCAGGTAGCTCTACCCCGTCTGGTGCAACCGGCTCCCCAGGTGCATCCCCGGGT |
| | | ACTAGCTCTACCGGTTCTCCAGGTGCAAGCGCAAGCGGCGCGCCAAGCACGGG |
| | | AGGTACTTCTCCGAGCGGTGAATCTTCTACCGCACCAGGTTCTACTAGCTCTACC |
| | | GCTGAATCTCCGGGCCCAGGTACTTCTCCGAGCGGTGAATCTTCTACTGCTCCAG |
| | | GTACCTCTGAAAGCGCTACTCCGGAGTCTGGCCCAGGTACCTCTACTGAACCGT |
| | | CTGAGGGTAGCGCTCCAGGTACTTCTACTGAACCGTCCGAAGGTAGCGCACCAG |
| | | GTTCTAGCCCTTCTGCATCTACTGGTACTGGCCCAGGTAGCTCTACTCCTTCTGG |
| | | TGCTACCGGCTCTCCAGGTGCTTCTCCGGGTACTAGCTCTACCGGTTCTCCAGGT |
| | | ACTTCTACTCCGGAAAGCGGTTCCGCATCTCCAGGTACTTCTCCTAGCGGTGAAT |
| | | CTTCTACTGCTCCAGGTACCTCTCCTAGCGGCGAATCTTCTACTGCTCCAGGTAC |
| | | TTCTGAAAGCGCAACCCCTGAATCCGGTCCAGGTAGCGAACCGGCTACTTCTGG |
| | | CTCTGAGACTCCAGGTACTTCTACCGAACCGTCCGAAGGTAGCGCACCAGGTTC |
| | | TACCAGCGAATCCCCTTCTGGTACTGCTCCAGGTTCTACCAGCGAATCCCCTTCT |
| | | GGCACCGCACCAGGTACTTCTACCCCTGAAAGCGGCTCCGCTTCTCCAGGTAGC |
| | | CCGGCAGGCTCTCCGACCTCTACTGAGGAAGGTACTTCTGAAAGCGCAACCCCG |
| | | GAGTCCGGCCCAGGTACCTCTACCGAACCGTCTGAGGGCAGCGCACCAGGTAGC |
| | | CCTGCTGGCTCTCCAACCTCCACCGAAGAAGGTACCTCTGAAAGCGCAACCCCT |
| | | GAATCCGGCCCAGGTAGCGAACCGGCAACCTCCGGTTCTGAAACCCCAGGTAGC |
| | | TCTACCCCGTCTGGTGCTACCGGTTCCCCAGGTGCTTCTCCTGGTACTAGCTCTA |
| | | CCGGTTCTCCAGGTAGCTCTACCCCGTCTGGTGCTACTGGCTCTCCAGGTTCTAC |
| | | TAGCGAATCCCCGTCTGGTACTGCTCCAGGTACTTCCCCTAGCGGTGAATCTTCT |
| | | ACTGCTCCAGGTTCTACCAGCTCTACCGCAGAATCTCCGGGTCCAGGTAGCTCT |
| | | ACCCCTTCTGGTGCAACCGGCTCTCCAGGTGCATCCCCGGGTACCAGCTCTACC |
| | | GGTTCTCCAGGTACTCCGGGTAGCGGTACCGCTTCTTCCTCTCCAGGTAGCCCTG |
| | | CTGGCTCTCCGACTTCTACTGAGGAAGGTAGCCCGGCTGGTTCTCCGACTTCTAC |
| | | TGAGGAAGGTACTTCTACCGAACCTTCCGAAGGTAGCGCTCCA |
| BC864 | 122 | GGTACTTCCACCGAACCATCCGAACCAGGTAGCGCAGGTACTTCCACCGAACCA |
| | | TCCGAACCTGGCAGCGCAGGTAGCGAACCGGCAACCTCTGGTACTGAACCATCA |
| | | GGTAGCGGCGCATCCGAGCCTACCTCTACTGAACCAGGTAGCGAACCGGCTACC |
| | | TCCGGTACTGAGCCATCAGGTAGCGAACCGGCAACTTCCGGTACTGAACCATCA |
| | | GGTAGCGAACCGGCAACTTCCGGCACTGAACCATCAGGTAGCGGTGCATCTGAG |
| | | CCGACCTCTACTGAACCAGGTACTTCTACTGAACCATCTGAGCCGGGCAGCGCA |
| | | GGTAGCGAACCAGCTACTTCTGGCACTGAACCATCAGGTACTTCTACTGAACCA |
| | | TCCGAACCAGGTAGCGCAGGTAGCGAACCTGCTACCTCTGGTACTGAGCCATCA |
| | | GGTAGCGAACCGGCTACCTCTGGTACTGAACCATCAGGTACTTCTACCGAACCA |
| | | TCCGAGCCTGGTAGCGCAGGTACTTCTACCGAACCATCCGAGCCAGGCAGCGCA |
| | | GGTAGCGAACCGGCAACCTCTGGCACTGAGCCATCAGGTAGCGAACCAGCAAC |
| | | TTCTGGTACTGAACCATCAGGTACTAGCGAGCCATCTACTTCCGAACCAGGTGC |
| | | AGGTAGCGGCGCATCCGAACCTACTTCCACTGAACCAGGTACTAGCGAGCCATC |
| | | CACCTCTGAACCAGGTGCAGGTAGCGAACCGGCAACTTCCGGCACTGAACCATC |
| | | AGGTAGCGAACCGGCTACCTCTGGTACTGAACCATCAGGTACTTCTACCGAACC |
| | | ATCCGAGCCTGGTAGCGCAGGTACTTCTACCGAACCATCCGAGCCAGGCAGCGC |
| | | AGGTAGCGGTGCATCCGAGCCGACCTCTACTGAACCAGGTAGCGAACCAGCAA |
| | | CTTCTGGCACTGAGCCATCAGGTAGCGAACCAGCTACCTCTGGTACTGAACCAT |
| | | CAGGTAGCGAACCGGCTACTTCCGGCACTGAACCATCAGGTAGCGAACCAGCA |
| | | ACCTCCGGTACTGAACCATCAGGTACTTCCACTGAACCATCCGAACCGGGTAGC |
| | | GCAGGTAGCGAACCGGCAACTTCCGGCACTGAACCATCAGGTAGCGGTGCATCT |
| | | GAGCCGACCTCTACTGAACCAGGTACTTCTACTGAACCATCTGAGCCGGGCAGC |
| | | GCAGGTAGCGAACCTGCAACCTCCGGCACTGAGCCATCAGGTAGCGGCGCATCT |
| | | GAACCAACCTCTACTGAACCAGGTACTTCCACCGAACCATCTGAGCCAGGCAGC |
| | | GCAGGTAGCGGCGCATCTGAACCAACCTCTACTGAACCAGGTAGCGAACCAGC |
| | | AACTTCTGGTACTGAACCATCAGGTAGCGGCGCATCTGAGCCTACTTCCACTGA |
| | | ACCAGGTAGCGAACCGGCAACTTCCGGCACTGAACCATCAGGTAGCGGTGCATC |
| | | TGAGCCGACCTCTACTGAACCAGGTACTTCTACTGAACCATCTGAGCCGGGCAG |
| | | CGCAGGTAGCGAACCGGCAACTTCCGGCACTGAACCATCAGGTAGCGGTGCATC |
| | | TGAGCCGACCTCTACTGAACCAGGTACTTCTACTGAACCATCTGAGCCGGGCAG |
| | | CGCAGGTAGCGAACCAGCTACTTCTGGCACTGAACCATCAGGTACTTCTACTGA |
| | | ACCATCCGAACCAGGTAGCGCAGGTAGCGAACCTGCTACCTCTGGTACTGAGCC |
| | | ATCAGGTACTTCTACTGAACCATCCGAGCCGGGTAGCGCAGGTACTTCCACTGA |
| | | ACCATCTGAACCTGGTAGCGCAGGTACTTCCACTGAACCATCCGAACCAGGTAG |
| | | CGCAGGTACTTCTACTGAACCATCCGAGCCGGGTAGCGCAGGTACTTCCACTGA |
| | | ACCATCTGAACCTGGTAGCGCAGGTACTTCCACTGAACCATCCGAACCAGGTAG |
| | | CGCAGGTACTAGCGAACCATCCACCTCCGAACCAGGCGCAGGTAGCGGTGCATC |
| | | TGAACCGACTTCTACTGAACCAGGTACTTCCACTGAACCATCTGAGCCAGGTAG |
| | | CGCAGGTACTTCCACCGAACCATCCGAACCAGGTAGCGCAGGTACTTCCACCGA |
| | | ACCATCCGAACCTGGCAGCGCAGGTAGCGAACCGGCAACCTCTGGTACTGAACC |
| | | ATCAGGTAGCGGTGCATCCGAGCCGACCTCTACTGAACCAGGTAGCGAACCAGC |
| | | AACTTCTGGCACTGAGCCATCAGGTAGCGAACCAGCTACCTCTGGTACTGAACC |
| | | ATCAGGTAGCGAACCGGCAACCTCTGGCACTGAGCCATCAGGTAGCGAACCAG |
| | | CAACTTCTGGTACTGAACCATCAGGTACTAGCGAGCCATCTACTTCCGAACCAG |
| | | GTGCAGGTAGCGAACCTGCAACCTCCGGCACTGAGCCATCAGGTAGCGGCGCAT |
| | | CTGAACCAACCTCTACTGAACCAGGTACTTCCACCGAACCATCTGAGCCAGGCA |
| | | GCGCAGGTAGCGAACCTGCAACCTCCGGCACTGAGCCATCAGGTAGCGGCGCA |
| | | TCTGAACCAACCTCTACTGAACCAGGTACTTCCACCGAACCATCTGAGCCAGGC |
| | | AGCGCA |
| BD864 | 123 | GGTAGCGAAACTGCTACTTCCGGCTCTGAGACTGCAGGTACTAGTGAATCCGCA |
| | | ACTAGCGAATCTGGCGCAGGTAGCACTGCAGGCTCTGAGACTTCCACTGAAGCA |
| | | GGTACTAGCGAGTCCGCAACCAGCGAATCCGGCGCAGGTAGCGAAACTGCTAC |
| | | CTCTGGCTCCGAGACTGCAGGTAGCGAAACTGCAACCTCTGGCTCTGAAACTGC |
| | | AGGTACTTCCACTGAAGCAAGTGAAGGCTCCGCATCAGGTACTTCCACCGAAGC |
| | | AAGCGAAGGCTCCGCATCAGGTACTAGTGAGTCCGCAACTAGCGAATCCGGTGC |
| | | AGGTAGCGAAACCGCTACCTCTGGTTCCGAAACTGCAGGTACTTCTACCGAGGC |
| | | TAGCGAAGGTTCTGCATCAGGTAGCACTGCTGGTTCCGAGACTTCTACTGAAGC |
| | | AGGTACTAGCGAATCTGCTACTAGCGAATCCGGCGCAGGTACTAGCGAATCCGC |
| | | TACCAGCGAATCCGGCGCAGGTAGCGAAACTGCAACCTCTGGTTCCGAGACTGC |
| | | AGGTACTAGCGAGTCCGCTACTAGCGAATCTGGCGCAGGTACTTCCACTGAAGC |
| | | TAGTGAAGGTTCTGCATCAGGTAGCGAAACTGCTACTTCTGGTTCCGAAACTGC |
| | | AGGTAGCGAAACCGCTACCTCTGGTTCCGAAACTGCAGGTACTTCTACCGAGGC |
| | | TAGCGAAGGTTCTGCATCAGGTAGCACTGCTGGTTCCGAGACTTCTACTGAAGC |
| | | AGGTACTAGCGAGTCCGCTACTAGCGAATCTGGCGCAGGTACTTCCACTGAAGC |
| | | TAGTGAAGGTTCTGCATCAGGTAGCGAAACTGCTACTTCTGGTTCCGAAACTGC |
| | | AGGTAGCACTGCTGGCTCCGAGACTTCTACCGAAGCAGGTAGCACTGCAGGTTC |
| | | CGAAACTTCCACTGAAGCAGGTAGCGAAACTGCTACCTCTGGCTCTGAGACTGC |
| | | AGGTACTAGCGAATCTGCTACTAGCGAATCCGGCGCAGGTACTAGCGAATCCGC |
| | | TACCAGCGAATCCGGCGCAGGTAGCGAAACTGCAACCTCTGGTTCCGAGACTGC |
| | | AGGTACTAGCGAATCTGCTACTAGCGAATCCGGCGCAGGTACTAGCGAATCCGC |
| | | TACCAGCGAATCCGGCGCAGGTAGCGAAACTGCAACCTCTGGTTCCGAGACTGC |
| | | AGGTAGCGAAACCGCTACCTCTGGTTCCGAAACTGCAGGTACTTCTACCGAGGC |
| | | TAGCGAAGGTTCTGCATCAGGTAGCACTGCTGGTTCCGAGACTTCTACTGAAGC |
| | | AGGTAGCGAAACTGCTACTTCCGGCTCTGAGACTGCAGGTACTAGTGAATCCGC |
| | | AACTAGCGAATCTGGCGCAGGTAGCACTGCAGGCTCTGAGACTTCCACTGAAGC |
| | | AGGTAGCACTGCTGGTTCCGAAACCTCTACCGAAGCAGGTAGCACTGCAGGTTC |
| | | TGAAACCTCCACTGAAGCAGGTACTTCCACTGAGGCTAGTGAAGGCTCTGCATC |
| | | AGGTAGCACTGCTGGTTCCGAAACCTCTACCGAAGCAGGTAGCACTGCAGGTTC |
| | | TGAAACCTCCACTGAAGCAGGTACTTCCACTGAGGCTAGTGAAGGCTCTGCATC |
| | | AGGTAGCACTGCAGGTTCTGAGACTTCCACCGAAGCAGGTAGCGAAACTGCTAC |
| | | TTCTGGTTCCGAAACTGCAGGTACTTCCACTGAAGCTAGTGAAGGTTCCGCATC |
| | | AGGTACTAGTGAGTCCGCAACCAGCGAATCCGGCGCAGGTAGCGAAACCGCAA |
| | | CCTCCGGTTCTGAAACTGCAGGTACTAGCGAATCCGCAACCAGCGAATCTGGCG |
| | | CAGGTACTAGTGAGTCCGCAACCAGCGAATCCGGCGCAGGTAGCGAAACCGCA |
| | | ACCTCCGGTTCTGAAACTGCAGGTACTAGCGAATCCGCAACCAGCGAATCTGGC |
| | | GCAGGTAGCGAAACTGCTACTTCCGGCTCTGAGACTGCAGGTACTTCCACCGAA |
| | | GCAAGCGAAGGTTCCGCATCAGGTACTTCCACCGAGGCTAGTGAAGGCTCTGCA |
| | | TCAGGTAGCACTGCTGGCTCCGAGACTTCTACCGAAGCAGGTAGCACTGCAGGT |
| | | TCCGAAACTTCCACTGAAGCAGGTAGCGAAACTGCTACCTCTGGCTCTGAGACT |
| | | GCAGGTACTAGCGAATCTGCTACTAGCGAATCCGGCGCAGGTACTAGCGAATCC |
| | | GCTACCAGCGAATCCGGCGCAGGTAGCGAAACTGCAACCTCTGGTTCCGAGACT |
| | | GCAGGTAGCGAAACTGCTACTTCCGGCTCCGAGACTGCAGGTAGCGAAACTGCT |
| | | ACTTCTGGCTCCGAAACTGCAGGTACTTCTACTGAGGCTAGTGAAGGTTCCGCA |
| | | TCAGGTACTAGCGAGTCCGCAACCAGCGAATCCGGCGCAGGTAGCGAAACTGC |
| | | TACCTCTGGCTCCGAGACTGCAGGTAGCGAAACTGCAACCTCTGGCTCTGAAAC |
| | | TGCAGGTACTAGCGAATCTGCTACTAGCGAATCCGGCGCAGGTACTAGCGAATC |
| | | CGCTACCAGCGAATCCGGCGCAGGTAGCGAAACTGCAACCTCTGGTTCCGAGAC |
| | | TGCA |

[0263] One may clone the library of XTEN-encoding genes into one or more expression vectors known in the art. To facilitate the identification of well-expressing library members, one can construct the library as fusion to a reporter protein. Non-limiting examples of suitable reporter genes are green fluorescent protein, luciferace, alkaline phosphatase, and beta-galactosidase. By screening, one can identify short XTEN sequences that can be expressed in high concentration in the host organism of choice. Subsequently, one can generate a library of random XTEN dimers and repeat the screen for high level of expression. Subsequently, one can screen the resulting constructs for a number of properties such as level of expression, protease stability, or binding to antiserum.

[0264] One aspect of the invention is to provide polynucleotide sequences encoding the components of the fusion protein wherein the creation of the sequence has undergone codon optimization. Of particular interest is codon optimization with the goal of improving expression of the polypeptide compositions and to improve the genetic stability of the encoding gene in the production hosts. For example, codon optimization is of particular importance for XTEN sequences that are rich in glycine or that have very repetitive amino acid sequences. Codon optimization is performed using computer programs (Gustafsson, C., et al. (2004) Trends Biotechnol, 22: 346-53), some of which minimize ribosomal pausing (Coda Genomics Inc.). In one embodiment, one can perform codon optimization by constructing codon libraries where all members of the library encode the same amino acid sequence but where codon usage is varied. Such libraries can be screened for highly expressing and genetically stable members that are particularly suitable for the large-scale production of XTEN-containing products. When designing XTEN sequences one can consider a number of properties. One can minimize the repetitiveness in the encoding DNA sequences. In addition, one can avoid or minimize the use of codons that are rarely used by the production host (e.g. the AGG and AGA arginine codons and one leucine codon in E. coli). In the case of E. coli, two glycine codons, GGA and GGG, are rarely used in highly expressed proteins. Thus codon optimization of the gene encoding XTEN sequences can be very desirable. DNA sequences that have a high level of glycine tend to have a high GC content that can lead to instability or low expression levels. Thus, when possible, it is preferred to choose codons such that the GC-content of XTEN-encoding sequence is suitable for the production organism that will be used to manufacture the XTEN.

[0265] Optionally, the full-length XTEN-encoding gene comprises one or more sequencing islands. In this context, sequencing islands are short-stretch sequences that are distinct from the XTEN library construct sequences and that include a restriction site not present or expected to be present in the full-length XTEN-encoding gene. In one embodiment, a sequencing island is the sequence

(SEQ ID NO: 124)

5′-AGGTGCAAGCGCAAGCGGCGCGCCAAGCACGGGAGGT-3′.

[0266] In another embodiment, a sequencing island is the sequence

(SEQ ID NO: 125)

5′-AGGTCCAGAACCAACGGGGCCGGCCCCAAGCGGAGGT-3′.

[0267] As an alternative, one can construct codon libraries where all members of the library encode the same amino acid sequence but where codon usage for the respective amino acids in the sequence is varied. Such libraries can be screened for highly expressing and genetically stable members that are particularly suitable for the large-scale production of XTEN-containing products.

[0268] Optionally, one can sequence clones in the library to eliminate isolates that contain undesirable sequences. The initial library of short XTEN sequences allows some variation in amino acid sequence. For instance one can randomize some codons such that a number of hydrophilic amino acids can occur in a particular position. During the process of iterative multimerization one can screen the resulting library members for other characteristics like solubility or protease resistance in addition to a screen for high-level expression.

[0269] Once the gene that encodes the XTEN of desired length and properties is selected, it is genetically fused to the nucleotides encoding the N- and/or the C-terminus of the GH gene(s) by cloning it into the construct adjacent and in frame with the gene coding for GH or, optionally, adjacent to a spacer sequence. The invention provides various permutations of the foregoing, depending on the GHXTEN to be encoded. For example, a gene encoding a GHXTEN fusion protein comprising a GH and two XTEN, such as embodied by formula VI, as depicted above, the gene would have polynucleotides encoding GH, encoding two XTEN, which can be identical or different in composition and sequence length. In one non-limiting embodiment of the foregoing, the GH polynucleotides would encode human growth hormone and the polynucleotides encoding the N-terminus XTEN would encode AE912 and the polynucleotides encoding the C-terminus XTEN would encode AE144. The step of cloning the GH genes into the XTEN construct can occur through a ligation or multimerization step. As shown in FIG. 2, the constructs encoding GHXTEN fusion proteins can be designed in different configurations of the components XTEN 202, GH 203, and spacer sequences 204. In one embodiment, as illustrated in FIG. 2A, the construct comprises polynucleotide sequences complementary to, or those that encode a monomeric polypeptide of components in the following order (5′ to 3′) GH 203 and XTEN 202, or the reverse order. In another embodiment, as illustrated in FIG. 2B, the construct comprises polynucleotide sequences complementary to, or those that encode a monomeric polypeptide of components in the following order (5′ to 3′) GH 203, spacer sequence 204, and XTEN 202, or the reverse order. In another embodiment, as illustrated in FIG. 2C, the construct 201 encodes a monomeric GHXTEN comprising polynucleotide sequences complementary to, or those that encode components in the following order (5′ to 3′): two molecules of GH 203 and XTEN 202, or the reverse order. In another embodiment, as illustrated in FIG. 2D, the construct comprises polynucleotide sequences complementary to, or those that encode a monomeric polypeptide of components in the following order (5′ to 3′): two molecules of GH 203, spacer sequence 204, and XTEN 202, or the reverse order. In another embodiment, as illustrated in FIG. 2E, the construct comprises polynucleotide sequences complementary to, or those that encode a monomeric polypeptide of components in the following order (5′ to 3′): GH 203, spacer sequence 204, a second molecule of GH 203, and XTEN 202, or the reverse order. In another embodiment, as illustrated in FIG. 2F, the construct comprises polynucleotide sequences complementary to, or those that encode a monomeric polypeptide of components in the following order (5′ to 3′): GH 203, XTEN 202, GH 203, and a second XTEN 202, or the reverse sequence. The spacer polynucleotides can optionally comprise sequences encoding cleavage sequences. As will be apparent to those of skill in the art, other permutations of the foregoing are possible.

[0270] The invention also encompasses polynucleotides comprising XTEN-encoding polynucleotide variants that have a high percentage of sequence identity to (a) a polynucleotide sequence from Table 7, or (b) sequences that are complementary to the polynucleotides of (a). A polynucleotide with a high percentage of sequence identity is one that has at least about an 80% nucleic acid sequence identity, alternatively at least about 81%, alternatively at least about 82%, alternatively at least about 83%, alternatively at least about 84%, alternatively at least about 85%, alternatively at least about 86%, alternatively at least about 87%, alternatively at least about 88%, alternatively at least about 89%, alternatively at least about 90%, alternatively at least about 91%, alternatively at least about 92%, alternatively at least about 93%, alternatively at least about 94%, alternatively at least about 95%, alternatively at least about 96%, alternatively at least about 97%, alternatively at least about 98%, and alternatively at least about 99% nucleic acid sequence identity to (a) or (b) of the foregoing, or that can hybridize with the target polynucleotide or its complement under stringent conditions.

[0271] Homology, sequence similarity or sequence identity of nucleotide or amino acid sequences may also be determined conventionally by using known software or computer programs such as the BestFit or Gap pairwise comparison programs (GCG Wisconsin Package, Genetics Computer Group, 575 Science Drive, Madison, Wis. 53711). BestFit uses the local homology algorithm of Smith and Waterman (Advances in Applied Mathematics. 1981. 2: 482-489), to find the best segment of identity or similarity between two sequences. Gap performs global alignments: all of one sequence with all of another similar sequence using the method of Needleman and Wunsch, (Journal of Molecular Biology. 1970. 48:443-453). When using a sequence alignment program such as BestFit, to determine the degree of sequence homology, similarity or identity, the default setting may be used, or an appropriate scoring matrix may be selected to optimize identity, similarity or homology scores.

[0272] Nucleic acid sequences that are “complementary” are those that are capable of base-pairing according to the standard Watson-Crick complementarity rules. As used herein, the term “complementary sequences” means nucleic acid sequences that are substantially complementary, as may be assessed by the same nucleotide comparison set forth above, or as defined as being capable of hybridizing to the polynucleotides that encode the GHXTEN sequences under stringent conditions, such as those described herein.

[0273] The resulting polynucleotides encoding the GHXTEN chimeric fusion proteins can then be individually cloned into an expression vector. The nucleic acid sequence is inserted into the vector by a variety of procedures. In general, DNA is inserted into an appropriate restriction endonuclease site(s) using techniques known in the art. Vector components generally include, but are not limited to, one or more of a signal sequence, an origin of replication, one or more marker genes, an enhancer element, a promoter, and a transcription termination sequence. Construction of suitable vectors containing one or more of these components employs standard ligation techniques which are known to the skilled artisan. Such techniques are well known in the art and well described in the scientific and patent literature.

[0274] Various vectors are publicly available. The vector may, for example, be in the form of a plasmid, cosmid, viral particle, or phage. The invention provides for the use of plasmid vectors containing replication and control sequences that are compatible with and recognized by the host cell, and are operably linked to the GHXTEN gene for controlled expression of the GHXTEN fusion proteins. The vector ordinarily carries a replication site, as well as sequences that encode proteins that are capable of providing phenotypic selection in transformed cells. Such vector sequences are well known for a variety of bacteria, yeast, and viruses. Useful expression vectors that can be used include, for example, segments of chromosomal, non-chromosomal and synthetic DNA sequences. “Expression vector” refers to a DNA construct containing a DNA sequence that is operably linked to a suitable control sequence capable of effecting the expression of the DNA encoding the fusion protein in a suitable host. Such control sequences include a promoter to effect transcription, an optional operator sequence to control such transcription, a sequence encoding suitable mRNA ribosome binding sites, and sequences that control termination of transcription and translation. Other suitable vectors include, but are not limited to, derivatives of SV40 and pcDNA and known bacterial plasmids such as col EI, pCR1, pBR322, pMal-C2, pET, pGEX as described by Smith, et al., Gene 57:31-40 (1988), pMB9 and derivatives thereof, plasmids such as RP4, phage DNAs such as the numerous derivatives of phage I such as NM98 9, as well as other phage DNA such as M13 and filamentous single stranded phage DNA; yeast plasmids such as the 2 micron plasmid or derivatives of the 2m plasmid, as well as centomeric and integrative yeast shuttle vectors; vectors useful in eukaryotic cells such as vectors useful in insect or mammalian cells; vectors derived from combinations of plasmids and phage DNAs, such as plasmids that have been modified to employ phage DNA or the expression control sequences; and the like. The requirements are that the vectors are replicable and viable in the host cell of choice. Low- or high-copy number vectors may be used as desired.

[0275] Promoters suitable for use in expression vectors with prokaryotic hosts include the β-lactamase and lactose promoter systems [Chang et al., Nature, 275:615 (1978); Goeddel et al., Nature, 281:544 (1979)], alkaline phosphatase, a tryptophan (trp) promoter system [Goeddel, Nucleic Acids Res., 8:4057 (1980); EP 36,776], and hybrid promoters such as the tac promoter [deBoer et al., Proc. Natl. Acad. Sci. USA, 80:21-25 (1983)], all would be operably linked to the DNA encoding GHXTEN polypeptides. Promoters for use in bacterial systems can also contain a Shine-Dalgarno (S.D.) sequence, operably linked to the DNA encoding GHXTEN polypeptides.

[0276] The invention contemplates use of other expression systems including, for example, a baculovirus expression system with both non-fusion transfer vectors, such as, but not limited to pVL941 Summers, et al., Virology 84:390-402 (1978)), pVL1393 (Invitrogen), pVL1392 (Summers, et al., Virology 84:390-402 (1978) and Invitrogen) and pBlueBacIII (Invitrogen), and fusion transfer vectors such as, but not limited to, pAc7 00 (Summers, et al., Virology 84:390-402 (1978)), pAc701 and pAc70-2 (same as pAc700, with different reading frames), pAc360 Invitrogen) and pBlueBacHisA, B, C (; Invitrogen) can be used.

[0277] Mammalian expression vectors can comprise an origin of replication, a suitable promoter and enhancer, and also any necessary ribosome binding sites, polyadenylation site, splice donor and acceptor sites, transcriptional termination sequences, and 5′ flanking nontranscribed sequences. DNA sequences derived from the SV40 splice, and polyadenylation sites may be used to provide the required nontranscribed genetic elements. Mammalian expression vectors contemplated for use in the invention include vectors with inducible promoters, such as the dihydrofolate reductase promoters, any expression vector with a DHFR expression cassette or a DHFR/methotrexate co-amplification vector such as pED (Randal J. Kaufman, 1991, Randal J. Kaufman, Current Protocols in Molecular Biology, 16,12 (1991)). Alternatively a glutamine synthetase/methionine sulfoximine co-amplification vector, such as pEE14 (Celltech). A vector that directs episomal expression under the control of the Epstein Barr Virus (EBV) or nuclear antigen (EBNA) can be used such as pREP4 (Invitrogen), pCEP4 (Invitrogen), pMEP4 (Invitrogen), pREP8 (Invitrogen), pREP9 (Invitrogen), and pEBVHis (Invitrogen).

[0278] Selectable mammalian expression vectors for use in the invention include, but are not limited to, pRc/CMV (Invitrogen), pRc/RSV (Invitrogen) and the like. Vaccinia virus mammalian expression vectors (see, for example, Randall J. Kaufman, Current Protocols in Molecular Biology 16.12 (Frederick M. Ausubel, et al., eds. Wiley 1991) that can be used in the present invention include, but are not limited to, pSC11, pMJ601 pTKgptFISand the like.

[0279] Yeast expression systems that can also be used in the present invention include, but are not limited to, the non-fusion pYES2 vector (Invitrogen), the fusion pYESHisA, B, C (Invitrogen), pRS vectors and the like.

[0280] In addition, the expression vector containing the chimeric GHXTEN fusion protein-encoding polynucleotide molecule may include drug selection markers. Such markers aid in cloning and in the selection or identification of vectors containing chimeric DNA molecules. For example, genes that confer resistance to neomycin, puromycin, hygromycin, dihydrofolate reductase (DHFR) inhibitor, guanine phosphoribosyl transferase (GPT), zeocin, and histidinol are useful selectable markers. Alternatively, enzymes such as herpes simplex virus thymidine kinase (tk) or chloramphenicol acetyltransferase (CAT) may be employed. Immunologic markers also can be employed. Any known selectable marker may be employed so long as it is capable of being expressed simultaneously with the nucleic acid encoding a gene product. Further examples of selectable markers are well known to one of skill in the art and include reporters such as enhanced green fluorescent protein (EGFP), beta-galactosidase (β-gal) or chloramphenicol acetyltransferase (CAT).

[0281] In one embodiment, the polynucleotide encoding a GHXTEN fusion protein composition is fused C-terminally to an N-terminal signal sequence appropriate for the expression host system. Signal sequences are typically proteolytically removed from the protein during the translocation and secretion process, generating a defined N-terminus. A wide variety of signal sequences have been described for most expression systems, including bacterial, yeast, insect, and mammalian systems. A non-limiting list of preferred examples for each expression system follows herein. Preferred signal sequences are OmpA, PhoA, and DsbA for E. coli expression. Signal peptides preferred for yeast expression are ppL-alpha, DEX4, invertase signal peptide, acid phosphatase signal peptide, CPY, or INU1. For insect cell expression the preferred signal sequences are sexta adipokinetic hormone precursor, CP1, CP2, CP3, CP4, TPA, PAP, or gp67. For mammalian expression the preferred signal sequences are IL2L, SV40, IgG kappa and IgG lambda.

[0282] In another embodiment, a leader sequence, potentially comprising a well-expressed, independent protein domain, can be fused to the N-terminus of the GHXTEN sequence, separated by a protease cleavage site. While any leader peptide sequence which does not inhibit cleavage at the designed proteolytic site can be used, sequences in preferred embodiments will comprise stable, well-expressed sequences such that expression and folding of the overall composition is not significantly adversely affected, and preferably expression, solubility, and/or folding efficiency are significantly improved. A wide variety of suitable leader sequences have been described in the literature. A non-limiting list of suitable sequences includes maltose binding protein, cellulose binding domain, glutathione S-transferase, 6×His tag (SEQ ID NO: 126), FLAG tag, hemaglutinin tag, and green fluorescent protein. The leader sequence can also be further improved by codon optimization, especially in the second codon position following the ATG start codon, by methods well described in the literature and hereinabove.

[0283] Various in vitro enzymatic methods for cleaving proteins at specific sites are known. Such methods include use of enterokinase (DDDK (SEQ ID NO: 127)), Factor Xa (IDGR (SEQ ID NO: 128)), thrombin (LVPRGS (SEQ ID NO: 129)), PreScission™ (LEVLFQGP (SEQ ID NO: 130)), TEV protease (EQLYFQG (SEQ ID NO: 131)), 3C protease (ETLFQGP (SEQ ID NO: 132)), Sortase A (LPETG (SEQ ID NO: 133)), Granzyme B (D/X, N/X, M/N or SA), inteins, SUMO, DAPase (TAGZyme™), Aeromonas aminopeptidase, Aminopeptidase M, and carboxypeptidases A and B. Additional methods are disclosed in Arnau, et al., Protein Expression and Purification 48: 1-13 (2006).

[0284] In other cases, the invention provides constructs and methods of making constructs comprising an polynucleotide sequence optimized for expression that encodes at least about 20 to about 60 amino acids with XTEN characteristics that can be included at the N-terminus of an XTEN carrier encoding sequence (in other words, the polynucleotides encoding the 20-60 encoded optimized amino acids are linked in frame to polynucleotides encoding an XTEN component that is N-terminal to GH) to promote the initiation of translation to allow for expression of XTEN fusions at the N-terminus of proteins without the presence of a helper domain. In an advantage of the foregoing, the sequence does not require subsequent cleavage, thereby reducing the number of steps to manufacture XTEN-containing compositions. As described in more detail in the Examples, the optimized N-terminal sequence has attributes of an unstructured protein, but may include nucleotide bases encoding amino acids selected for their ability to promote initiation of translation and enhanced expression. In one embodiment of the foregoing, the optimized polynucleotide encodes an XTEN sequence with at least about 90% sequence identity to AE912. In another embodiment of the foregoing, the optimized polynucleotide encodes an XTEN sequence with at least about 90% sequence identity to AM923. In another embodiment of the foregoing, the optimized polynucleotide encodes an XTEN sequence with at least about 90% sequence identity to AE48. In another embodiment of the foregoing, the optimized polynucleotide encodes an XTEN sequence with at least about 90% sequence identity to AM48. In one embodiment, the optimized polynucleotide NTS comprises a sequence that exhibits at least about 80%, at least about 85%, at least about 90%, at least about 91%, at least about 92%, at least about 93%, at least about 94%, at least about 95%, at least about 96%, at least about 97%, at least about 98%, or at least about 99%, sequence identity to a sequence or its complement selected from

AE 48:

(SEQ ID NO: 134)

5′-
ATGGCTGAACCTGCTGGCTCTCCAACCTCCACTGAGGAAGGTACCCCGGG
TAGCGGTACTGCTTCTTCCTCTCCAGGTAGCTCTACCCCTTCTGGTGCAA
CCGGCTCTCCAGGTGCTTCTCCGGGCACCAGCTCTACCGGTTCTCCA-3′
and
AM 48:

(SEQ ID NO: 135)

5′-
ATGGCTGAACCTGCTGGCTCTCCAACCTCCACTGAGGAAGGTGCATCCCC
GGGCACCAGCTCTACCGGTTCTCCAGGTAGCTCTACCCCGTCTGGTGCTA
CCGGCTCTCCAGGTAGCTCTACCCCGTCTGGTGCTACTGGCTCTCCA-3′

[0285] In another embodiment, the protease site of the leader sequence construct is chosen such that it is recognized by an in vivo protease. In this embodiment, the protein is purified from the expression system while retaining the leader by avoiding contact with an appropriate protease. The full-length construct is then injected into a patient. Upon injection, the construct comes into contact with the protease specific for the cleavage site and is cleaved by the protease. In the case where the uncleaved protein is substantially less active than the cleaved form, this method has the beneficial effect of allowing higher initial doses while avoiding toxicity, as the active form is generated slowly in vivo. Some non-limiting examples of in vivo proteases which are useful for this application include tissue kallikrein, plasma kallikrein, trypsin, pepsin, chymotrypsin, thrombin, and matrix metalloproteinases, or the proteases of Table 6.

[0286] In this manner, a chimeric DNA molecule coding for a monomeric GHXTEN fusion protein is generated within the construct. Optionally, this chimeric DNA molecule may be transferred or cloned into another construct that is a more appropriate expression vector. At this point, a host cell capable of expressing the chimeric DNA molecule can be transformed with the chimeric DNA molecule. The vectors containing the DNA segments of interest can be transferred into the host cell by well-known methods, depending on the type of cellular host. For example, calcium chloride transfection is commonly utilized for prokaryotic cells, whereas calcium phosphate treatment, lipofection, or electroporation may be used for other cellular hosts. Other methods used to transform mammalian cells include the use of polybrene, protoplast fusion, liposomes, electroporation, and microinjection. See, generally, Sambrook, et al., supra.

[0287] The transformation may occur with or without the utilization of a carrier, such as an expression vector. Then, the transformed host cell is cultured under conditions suitable for expression of the chimeric DNA molecule encoding of GHXTEN.

[0288] The present invention also provides a host cell for expressing the monomeric fusion protein compositions disclosed herein. Examples of suitable eukaryotic host cells include, but are not limited to mammalian cells, such as VERO cells, HELA cells such as ATCC No. CCL2, CHO cell lines, COS cells, WI38 cells, BHK cells, HepG2 cells, 3T3 cells, A549 cells, PC12 cells, K562 cells, 293 cells, Sf9 cells and CvI cells. Examples of suitable non-mammalian eukaryotic cells include eukaryotic microbes such as filamentous fungi or yeast are suitable cloning or expression hosts for encoding vectors. Saccharomyces cerevisiae is a commonly used lower eukaryotic host microorganism. Others include Schizosaccharomyces pombe (Beach and Nurse, Nature, 290: 140 [1981]; EP 139,383 published 2 May 1985); Kluyveromyces hosts (U.S. Pat. No. 4,943,529; Fleer et al., Bio/Technology, 9:968-975 (1991)) such as, e.g., K. lactis (MW98-8C, CBS683, CBS4574; Louvencourt et al., J. Bacteriol., 737 [1983]), K. fragilis (ATCC 12,424), K. bulgaricus (ATCC 16,045), K. wickeramii (ATCC 24,178), K. waltii (ATCC 56,500), K. drosophilarum (ATCC 36,906; Van den Berg et al., Bio/Technology, 8:135 (1990)), K. thermotolerans, and K. marxianus; yarrowia (EP 402,226); Pichia pastoris (EP 183,070; Sreekrishna et al., J. Basic Microbiol., 28:265-278 [1988]); Candida; Trichoderma reesia (EP 244,234); Neurospora crassa (Case et al., Proc. Natl. Acad. Sci. USA, 76:5259-5263 [1979]); Schwanniomyces such as Schwanniomyces occidentalis (EP 394,538 published 31 Oct. 1990); and filamentous fungi such as, e.g., Neurospora, Penicillium, Tolypocladium (WO 91/00357 published 10 Jan. 1991), and Aspergillus hosts such as A. nidulans (Ballance et al., Biochem. Biophys. Res. Commun., 112:284-289 [1983]; Tilburn et al., Gene, 26:205-221 [1983]; Yelton et al., Proc. Natl. Acad. Sci. USA, 81: 1470-1474 [1984]) and A. niger (Kelly and Hynes, EMBO J., 4:475-479 [1985]). Methylotropic yeasts are suitable herein and include, but are not limited to, yeast capable of growth on methanol selected from the genera consisting of Hansenula, Candida, Kloeckera, Pichia, Saccharomyces, Torulopsis, and Rhodotorula. A list of specific species that are exemplary of this class of yeasts may be found in C. Anthony, The Biochemistry of Methylotrophs, 269 (1982).

[0289] Other suitable cells that can be used in the present invention include, but are not limited to, prokaryotic host cells strains such as Escherichia coli, (e.g., strain DH5-α), Bacillus subtilis, Salmonella typhimurium, or strains of the genera of Pseudomonas, Streptomyces and Staphylococcus. Non-limiting examples of suitable prokaryotes include those from the genera: Actinoplanes; Archaeoglobus; Bdellovibrio; Borrelia; Chloroflexus; Enterococcus; Escherichia; Lactobacillus; Listeria; Oceanobacillus; Paracoccus; Pseudomonas; Staphylococcus; Streptococcus; Streptomyces; Thermoplasma; and Vibrio. Non-limiting examples of specific strains include: Archaeoglobus fulgidus; Bdellovibrio bacteriovorus; Borrelia burgdorferi; Chloroflexus aurantiacus; Enterococcus faecalis; Enterococcus faecium; Lactobacillus johnsonii; Lactobacillus plantarum; Lactococcus lactis; Listeria innocua; Listeria monocytogenes; Oceanobacillus iheyensis; Paracoccus zeaxanthinifaciens; Pseudomonas mevalonii; Staphylococcus aureus; Staphylococcus epidermidis; Staphylococcus haemolyticus; Streptococcus agalactiae; Streptomyces griseolosporeus; Streptococcus mutans; Streptococcus pneumoniae; Streptococcus pyogenes; Thermoplasma acidophilum; Thermoplasma volcanium; Vibrio cholerae; Vibrio parahaemolyticus; and Vibrio vulnificus.

[0290] Host cells containing the polynucleotides of interest can be cultured in conventional nutrient media (e.g., Ham's nutrient mixture) modified as appropriate for activating promoters, selecting transformants or amplifying genes. The culture conditions, such as temperature, pH and the like, are those previously used with the host cell selected for expression, and will be apparent to the ordinarily skilled artisan. Cells are typically harvested by centrifugation, disrupted by physical or chemical means, and the resulting crude extract retained for further purification. For compositions secreted by the host cells, supernatant from centrifugation is separated and retained for further purification. Microbial cells employed in expression of proteins can be disrupted by any convenient method, including freeze-thaw cycling, sonication, mechanical disruption, or use of cell lysing agents, all of which are well known to those skilled in the art. Embodiments that involve cell lysis may entail use of a buffer that contains protease inhibitors that limit degradation after expression of the chimeric DNA molecule. Suitable protease inhibitors include, but are not limited to leupeptin, pepstatin or aprotinin. The supernatant then may be precipitated in successively increasing concentrations of saturated ammonium sulfate.

[0291] Gene expression may be measured in a sample directly, for example, by conventional Southern blotting, Northern blotting to quantitate the transcription of mRNA [Thomas, Proc. Natl. Acad. Sci. USA, 77:5201-5205 (1980)], dot blotting (DNA analysis), or in situ hybridization, using an appropriately labeled probe, based on the sequences provided herein. Alternatively, antibodies may be employed that can recognize specific duplexes, including DNA duplexes, RNA duplexes, and DNA-RNA hybrid duplexes or DNA-protein duplexes. The antibodies in turn may be labeled and the assay may be carried out where the duplex is bound to a surface, so that upon the formation of duplex on the surface, the presence of antibody bound to the duplex can be detected.

[0292] Gene expression, alternatively, may be measured by immunological of fluorescent methods, such as immunohistochemical staining of cells or tissue sections and assay of cell culture or body fluids or the detection of selectable markers, to quantitate directly the expression of gene product. Antibodies useful for immunohistochemical staining and/or assay of sample fluids may be either monoclonal or polyclonal, and may be prepared in any mammal Conveniently, the antibodies may be prepared against a native sequence GH polypeptide or against a synthetic peptide based on the DNA sequences provided herein or against exogenous sequence fused to GH and encoding a specific antibody epitope. Examples of selectable markers are well known to one of skill in the art and include reporters such as enhanced green fluorescent protein (EGFP), beta-galactosidase (β-gal) or chloramphenicol acetyltransferase (CAT).

[0293] Expressed GHXTEN polypeptide product(s) may be purified via methods known in the art or by methods disclosed herein. Procedures such as gel filtration, affinity purification, salt fractionation, ion exchange chromatography, size exclusion chromatography, hydroxyapatite adsorption chromatography, hydrophobic interaction chromatography and gel electrophoresis may be used; each tailored to recover and purify the fusion protein produced by the respective host cells. Some expressed GHXTEN may require refolding during isolation and purification. Methods of purification are described in Robert K. Scopes, Protein Purification: Principles and Practice, Charles R. Castor (ed.), Springer-Verlag 1994, and Sambrook, et al., supra. Multi-step purification separations are also described in Baron, et al., Crit. Rev. Biotechnol. 10:179-90 (1990) and Below, et al., J. Chromatogr. A. 679:67-83 (1994).

### VIII). Pharmaceutical Compositions

[0294] The present invention provides pharmaceutical compositions comprising GHXTEN. In one embodiment, the pharmaceutical composition comprises the GHXTEN fusion protein and at least one pharmaceutically acceptable carrier. GHXTEN polypeptides of the present invention can be formulated according to known methods to prepare pharmaceutically useful compositions, whereby the polypeptide is combined in admixture with a pharmaceutically acceptable carrier vehicle, such as aqueous solutions or buffers, pharmaceutically acceptable suspensions and emulsions. Examples of non-aqueous solvents include propyl ethylene glycol, polyethylene glycol and vegetable oils. Therapeutic formulations are prepared for storage by mixing the active ingredient having the desired degree of purity with optional physiologically acceptable carriers, excipients or stabilizers, as described in Remington's Pharmaceutical Sciences 16th edition, Osol, A. Ed. (1980), in the form of lyophilized formulations or aqueous solutions.

[0295] The pharmaceutical compositions can be administered orally, intranasally, parenterally or by inhalation therapy, and may take the form of tablets, lozenges, granules, capsules, pills, ampoules, suppositories or aerosol form. They may also take the form of suspensions, solutions and emulsions of the active ingredient in aqueous or nonaqueous diluents, syrups, granulates or powders. In addition, the pharmaceutical compositions can also contain other pharmaceutically active compounds or a plurality of compounds of the invention.

[0296] More particularly, the present pharmaceutical compositions may be administered for therapy by any suitable route including oral, rectal, nasal, topical (including transdermal, aerosol, buccal and sublingual), vaginal, parenteral (including subcutaneous, subcutaneous by infusion pump, intramuscular, intravenous and intradermal), intravitreal, and pulmonary. It will also be appreciated that the preferred route will vary with the condition and age of the recipient, and the disease being treated.

[0297] In one embodiment, the pharmaceutical composition is administered subcutaneously. In this embodiment, the composition may be supplied as a lyophilized powder to be reconstituted prior to administration. The composition may also be supplied in a liquid form, which can be administered directly to a patient. In one embodiment, the composition is supplied as a liquid in a pre-filled syringe such that a patient can easily self-administer the composition.

[0298] Extended release formulations useful in the present invention may be oral formulations comprising a matrix and a coating composition. Suitable matrix materials may include waxes (e.g., camauba, bees wax, paraffin wax, ceresine, shellac wax, fatty acids, and fatty alcohols), oils, hardened oils or fats (e.g., hardened rapeseed oil, castor oil, beef tallow, palm oil, and soya bean oil), and polymers (e.g., hydroxypropyl cellulose, polyvinylpyrrolidone, hydroxypropyl methyl cellulose, and polyethylene glycol). Other suitable matrix tabletting materials are microcrystalline cellulose, powdered cellulose, hydroxypropyl cellulose, ethyl cellulose, with other carriers, and fillers. Tablets may also contain granulates, coated powders, or pellets. Tablets may also be multi-layered. Multi-layered tablets are especially preferred when the active ingredients have markedly different pharmacokinetic profiles. Optionally, the finished tablet may be coated or uncoated.

[0299] The coating composition may comprise an insoluble matrix polymer and/or a water soluble material. Water soluble materials can be polymers such as polyethylene glycol, hydroxypropyl cellulose, hydroxypropyl methyl cellulose, polyvinylpyrrolidone, polyvinyl alcohol, or monomeric materials such as sugars (e.g., lactose, sucrose, fructose, mannitol and the like), salts (e.g., sodium chloride, potassium chloride and the like), organic acids (e.g., fumaric acid, succinic acid, lactic acid, and tartaric acid), and mixtures thereof. Optionally, an enteric polymer may be incorporated into the coating composition. Suitable enteric polymers include hydroxypropyl methyl cellulose, acetate succinate, hydroxypropyl methyl cellulose, phthalate, polyvinyl acetate phthalate, cellulose acetate phthalate, cellulose acetate trimellitate, shellac, zein, and polymethacrylates containing carboxyl groups. The coating composition may be plasticised by adding suitable plasticisers such as, for example, diethyl phthalate, citrate esters, polyethylene glycol, glycerol, acetylated glycerides, acetylated citrate esters, dibutylsebacate, and castor oil. The coating composition may also include a filler, which can be an insoluble material such as silicon dioxide, titanium dioxide, talc, kaolin, alumina, starch, powdered cellulose, MCC, or polacrilin potassium. The coating composition may be applied as a solution or latex in organic solvents or aqueous solvents or mixtures thereof. Solvents such as water, lower alcohol, lower chlorinated hydrocarbons, ketones, or mixtures thereof may be used.

[0300] The compositions of the invention may be formulated using a variety of excipients. Suitable excipients include microcrystalline cellulose (e.g. Avicel PH102, Avicel PH101), polymethacrylate, poly(ethyl acrylate, methyl methacrylate, trimethylammonioethyl methacrylate chloride) (such as Eudragit RS-30D), hydroxypropyl methylcellulose (Methocel K100M, Premium CR Methocel K100M, Methocel E5, Opadry®), magnesium stearate, talc, triethyl citrate, aqueous ethylcellulose dispersion (Surelease®), and protamine sulfate. The slow release agent may also comprise a carrier, which can comprise, for example, solvents, dispersion media, coatings, antibacterial and antifungal agents, isotonic and absorption delaying agents. Pharmaceutically acceptable salts can also be used in these slow release agents, for example, mineral salts such as hydrochlorides, hydrobromides, phosphates, or sulfates, as well as the salts of organic acids such as acetates, proprionates, malonates, or benzoates. The composition may also contain liquids, such as water, saline, glycerol, and ethanol, as well as substances such as wetting agents, emulsifying agents, or pH buffering agents. Liposomes may also be used as a carrier.

[0301] In another embodiment, the compositions of the present invention are encapsulated in liposomes, which have demonstrated utility in delivering beneficial active agents in a controlled manner over prolonged periods of time. Liposomes are closed bilayer membranes containing an entrapped aqueous volume. Liposomes may also be unilamellar vesicles possessing a single membrane bilayer or multilamellar vesicles with multiple membrane bilayers, each separated from the next by an aqueous layer. The structure of the resulting membrane bilayer is such that the hydrophobic (non-polar) tails of the lipid are oriented toward the center of the bilayer while the hydrophilic (polar) heads orient towards the aqueous phase. In one embodiment, the liposome may be coated with a flexible water soluble polymer that avoids uptake by the organs of the mononuclear phagocyte system, primarily the liver and spleen. Suitable hydrophilic polymers for surrounding the liposomes include, without limitation, PEG, polyvinylpyrrolidone, polyvinylmethylether, polymethyloxazoline, polyethyloxazoline, polyhydroxypropyloxazoline, polyhydroxypropylmethacrylamide, polymethacrylamide, polydimethylacrylamide, polyhydroxypropylmethacrylate, polyhydroxethylacrylate, hydroxymethylcellulose hydroxyethylcellulose, polyethyleneglycol, polyaspartamide and hydrophilic peptide sequences as described in U.S. Pat. Nos. 6,316,024; 6,126,966; 6,056,973; 6,043,094, the contents of which are incorporated by reference in their entirety.

[0302] Liposomes may be comprised of any lipid or lipid combination known in the art. For example, the vesicle-forming lipids may be naturally-occurring or synthetic lipids, including phospholipids, such as phosphatidylcholine, phosphatidylethanolamine, phosphatidic acid, phosphatidylserine, phasphatidylglycerol, phosphatidylinositol, and sphingomyelin as disclosed in U.S. Pat. Nos. 6,056,973 and 5,874,104. The vesicle-forming lipids may also be glycolipids, cerebrosides, or cationic lipids, such as 1,2-dioleyloxy-3-(trimethylamino) propane (DOTAP); N-[1-(2,3,-ditetradecyloxy)propyl-N,N-dimethyl-N-hydroxyethylammonium bromide (DMRIE); N-[1[(2,3,-dioleyloxy)propyl]-N,N-dimethyl-N-hydroxy ethylammonium bromide (DORIE); N-[1-(2,3-dioleyloxy)propyl]-N,N,N-trimethylammonium chloride (DOTMA); 3[N-(N′,N′-dimethylaminoethane) carbamoly] cholesterol (DC-Chol); or dimethyldioctadecylammonium (DDAB) also as disclosed in U.S. Pat. No. 6,056,973. Cholesterol may also be present in the proper range to impart stability to the vesicle as disclosed in U.S. Pat. Nos. 5,916,588 and 5,874,104.

[0303] Additional liposomal technologies are described in U.S. Pat. Nos. 6,759,057; 6,406,713; 6,352,716; 6,316,024; 6,294,191; 6,126,966; 6,056,973; 6,043,094; 5,965,156; 5,916,588; 5,874,104; 5,215,680; and 4,684,479, the contents of which are incorporated herein by reference. These describe liposomes and lipid-coated microbubbles, and methods for their manufacture. Thus, one skilled in the art, considering both the disclosure of this invention and the disclosures of these other patents could produce a liposome for the extended release of the polypeptides of the present invention.

[0304] For liquid formulations, a desired property is that the formulation be supplied in a form that can pass through a 25, 28, 30, 31, 32 gauge needle for intravenous, intramuscular, intraarticular, or subcutaneous administration.

[0305] Administration via transdermal formulations can be performed using methods also known in the art, including those described generally in, e.g., U.S. Pat. Nos. 5,186,938 and 6,183,770, 4,861,800, 6,743,211, 6,945,952, 4,284,444, and WO 89/09051, incorporated herein by reference in their entireties. A transdermal patch is a particularly useful embodiment with polypeptides having absorption problems. Patches can be made to control the release of skin-permeable active ingredients over a 12 hour, 24 hour, 3 day, and 7 day period. In one example, a 2-fold daily excess of a polypeptide of the present invention is placed in a non-volatile fluid. The compositions of the invention are provided in the form of a viscous, non-volatile liquid. The penetration through skin of specific formulations may be measures by standard methods in the art (for example, Franz et al., J. Invest. Derm. 64:194-195 (1975)). Examples of suitable patches are passive transfer skin patches, iontophoretic skin patches, or patches with microneedles such as Nicoderm.

[0306] In other embodiments, the composition may be delivered via intranasal, buccal, or sublingual routes to the brain to enable transfer of the active agents through the olfactory passages into the CNS and reducing the systemic administration. Devices commonly used for this route of administration are included in U.S. Pat. No. 6,715,485. Compositions delivered via this route may enable increased CNS dosing or reduced total body burden reducing systemic toxicity risks associated with certain drugs. Preparation of a pharmaceutical composition for delivery in a subdermally implantable device can be performed using methods known in the art, such as those described in, e.g., U.S. Pat. Nos. 3,992,518; 5,660,848; and 5,756,115.

[0307] Osmotic pumps may be used as slow release agents in the form of tablets, pills, capsules or implantable devices. Osmotic pumps are well known in the art and readily available to one of ordinary skill in the art from companies experienced in providing osmotic pumps for extended release drug delivery. Examples are ALZA's DUROS™; ALZA's OROS™; Osmotica Pharmaceutical's Osmodex™ system; Shire Laboratories' EnSoTrol™ system; and Alzet™. Patents that describe osmotic pump technology are U.S. Pat. Nos. 6,890,918; 6,838,093; 6,814,979; 6,713,086; 6,534,090; 6,514,532; 6,361,796; 6,352,721; 6,294,201; 6,284,276; 6,110,498; 5,573,776; 4,200,0984; and 4,088,864, the contents of which are incorporated herein by reference. One skilled in the art, considering both the disclosure of this invention and the disclosures of these other patents could produce an osmotic pump for the extended release of the polypeptides of the present invention.

[0308] Syringe pumps may also be used as slow release agents. Such devices are described in U.S. Pat. Nos. 4,976,696; 4,933,185; 5,017,378; 6,309,370; 6,254,573; 4,435,173; 4,398,908; 6,572,585; 5,298,022; 5,176,502; 5,492,534; 5,318,540; and 4,988,337, the contents of which are incorporated herein by reference. One skilled in the art, considering both the disclosure of this invention and the disclosures of these other patents could produce a syringe pump for the extended release of the compositions of the present invention. A.

### IX). Pharmaceutical Kits

[0309] In another aspect, the invention provides a kit to facilitate the use of the GHXTEN polypeptides. The kit comprises the pharmaceutical composition provided herein, a label identifying the pharmaceutical composition, and an instruction for storage, reconstitution and/or administration of the pharmaceutical compositions to a subject In some embodiment, the kit comprises, preferablly: (a) an amount of a GHXTEN fusion protein composition sufficient to treat a disease, condition or disorder upon administration to a subject in need thereof; and (b) an amount of a pharmaceutically acceptable carrier; together in a formulation ready for injection or for reconstitution with sterile water, buffer, or dextrose; together with a label identifying the GHXTEN drug and storage and handling conditions, and a sheet of the approved indications for the drug, instructions for the reconstitution and/or administration of the GHXTEN drug for the use for the prevention and/or treatment of a approved indication, appropriate dosage and safety information, and information identifying the lot and expiration of the drug. In another embodiment of the foregoing, the kit can comprise a second container that can carry a suitable diluent for the GHXTEN composition, which will provide the user with the appropriate concentration of GHXTEN to be delivered to the subject.

### EXAMPLES

### Example 1

### Construction of XTEN_AD36 Motif Segments

[0310] The following example describes the construction of a collection of codon-optimized genes encoding motif sequences of 36 amino acids. As a first step, a stuffer vector pCW0359 was constructed based on a pET vector and that includes a T7 promoter. pCW0359 encodes a cellulose binding domain (CBD) and a TEV protease recognition site followed by a stuffer sequence that is flanked by BsaI, BbsI, and KpnI sites. The BsaI and BbsI sites were inserted such that they generate compatible overhangs after digestion. The stuffer sequence is followed by a truncated version of the GFP gene and a His tag. The stuffer sequence contains stop codons and thus E. coli cells carrying the stuffer plasmid pCW0359 form non-fluorescent colonies. The stuffer vector pCW0359 was digested with BsaI and KpnI to remove the stuffer segment and the resulting vector fragment was isolated by agarose gel purification. The sequences were designated XTEN_AD36, reflecting the AD family of motifs. Its segments have the amino acid sequence [X]₃ where X is a 12mer peptide with the sequences: GESPGGSSGSES (SEQ ID NO: 136), GSEGSSGPGESS (SEQ ID NO: 137), GSSESGSSEGGP (SEQ ID NO: 138), or GSGGEPSESGSS (SEQ ID NO: 139). The insert was obtained by annealing the following pairs of phosphorylated synthetic oligonucleotide pairs:

AD1for:

(SEQ ID NO: 140)

AGGTGAATCTCCDGGTGGYTCYAGCGGTTCYGARTC
AD1rev:

(SEQ ID NO: 141)

ACCTGAYTCRGAACCGCTRGARCCACCHGGAGATTC
AD2for:

(SEQ ID NO: 142)

AGGTAGCGAAGGTTCTTCYGGTCCDGGYGARTCYTC
AD2rev:

(SEQ ID NO: 143)

ACCTGARGAYTCRCCHGGACCRGAAGAACCTTCGCT
AD3for:

(SEQ ID NO: 144)

AGGTTCYTCYGAAAGCGGTTCTTCYGARGGYGGTCC
AD3rev:

(SEQ ID NO: 145)

ACCTGGACCRCCYTCRGAAGAACCGCTTTCRGARGA
AD4for:

(SEQ ID NO: 146)

AGGTTCYGGTGGYGAACCDTCYGARTCTGGTAGCTC

[0311] We also annealed the phosphorylated oligonucleotide 3KpnIstopperFor: AGGTTCGTCTTCACTCGAGGGTAC (SEQ ID NO: 147) and the non-phosphorylated oligonucleotide pr_3KpnIstopperRev: CCTCGAGTGAAGACGA (SEQ ID NO: 148). The annealed oligonucleotide pairs were ligated, which resulted in a mixture of products with varying length that represents the varying number of 12mer repeats ligated to one BbsI/KpnI segment. The products corresponding to the length of 36 amino acids were isolated from the mixture by preparative agarose gel electrophoresis and ligated into the BsaI/KpnI digested stuffer vector pCW0359. Most of the clones in the resulting library designated LCW0401 showed green fluorescence after induction, which shows that the sequence of XTEN_AD36 had been ligated in frame with the GFP gene and that most sequences of XTEN_AD36 had good expression levels.

[0312] We screened 96 isolates from library LCW0401 for high level of fluorescence by stamping them onto agar plate containing IPTG. The same isolates were evaluated by PCR and 48 isolates were identified that contained segments with 36 amino acids as well as strong fluorescence. These isolates were sequenced and 39 clones were identified that contained correct XTEN_AD36 segments. The file names of the nucleotide and amino acid constructs for these segments are listed in Table 8.

TABLE 8
DNA and Amino Acid Sequences for 36-mer motifs

| | | SEQ ID | | SEQ ID |
|---|---|---|---|---|
| File name | Amino acid sequence | NO: | Nucleotide sequence | NO: |
| LCW0401_001_GFP- | GSGGEPSESGSSGESPGG | 149 | GGTTCTGGTGGCGAACCGTCCGAG | 150 |
| N_A01.ab1 | SSGSESGESPGGSSGSES | | TCTGGTAGCTCAGGTGAATCTCCG | |
| | | | GGTGGCTCTAGCGGTTCCGAGTCA | |
| | | | GGTGAATCTCCTGGTGGTTCCAGC | |
| | | | GGTTCCGAGTCA | |
| LCW0401_002_GFP- | GSEGSSGPGESSGESPGG | 151 | GGTAGCGAAGGTTCTTCTGGTCCTG | 152 |
| N_B01.ab1 | SSGSESGSSESGSSEGGP | | GCGAGTCTTCAGGTGAATCTCCTG | |
| | | | GTGGTTCCAGCGGTTCTGAATCAG | |
| | | | GTTCCTCCGAAAGCGGTTCTTCCGA | |
| | | | GGGCGGTCCA | |
| LCW0401_003_GFP- | GSSESGSSEGGPGSSESG | 153 | GGTTCCTCTGAAAGCGGTTCTTCCG | 154 |
| N_C01.ab1 | SSEGGPGESPGGSSGSES | | AAGGTGGTCCAGGTTCCTCTGAAA | |
| | | | GCGGTTCTTCTGAGGGTGGTCCAG | |
| | | | GTGAATCTCCGGGTGGCTCCAGCG | |
| | | | GTTCCGAGTCA | |
| LCW0401_004_GFP- | GSGGEPSESGSSGSSESG | 155 | GGTTCCGGTGGCGAACCGTCTGAA | 156 |
| N_D01.ab1 | SSEGGPGSGGEPSESGSS | | TCTGGTAGCTCAGGTTCTTCTGAAA | |
| | | | GCGGTTCTTCCGAGGGTGGTCCAG | |
| | | | GTTCTGGTGGTGAACCTTCCGAGTC | |
| | | | TGGTAGCTCA | |
| LCW0401_007_GFP- | GSSESGSSEGGPGSEGSS | 157 | GGTTCTTCCGAAAGCGGTTCTTCTG | 158 |
| N_F01.ab1 | GPGESSGSEGSSGPGESS | | AGGGTGGTCCAGGTAGCGAAGGTT | |
| | | | CTTCCGGTCCAGGTGAGTCTTCAGG | |
| | | | TAGCGAAGGTTCTTCTGGTCCTGGT | |
| | | | GAATCTTCA | |
| LCW0401_008_GFP- | GSSESGSSEGGPGESPGG | 159 | GGTTCCTCTGAAAGCGGTTCTTCCG | 160 |
| N_G01.ab1 | SSGSESGSEGSSGPGESS | | AGGGTGGTCCAGGTGAATCTCCAG | |
| | | | GTGGTTCCAGCGGTTCTGAGTCAG | |
| | | | GTAGCGAAGGTTCTTCTGGTCCAG | |
| | | | GTGAATCCTCA | |
| LCW0401_012_GFP- | GSGGEPSESGSSGSGGEP | 161 | GGTTCTGGTGGTGAACCGTCTGAG | 162 |
| N_H01.ab1 | SESGSSGSEGSSGPGESS | | TCTGGTAGCTCAGGTTCCGGTGGC | |
| | | | GAACCATCCGAATCTGGTAGCTCA | |
| | | | GGTAGCGAAGGTTCTTCCGGTCCA | |
| | | | GGTGAGTCTTCA | |
| LCW0401_015_GFP- | GSSESGSSEGGPGSEGSS | 163 | GGTTCTTCCGAAAGCGGTTCTTCCG | 164 |
| N_A02.ab1 | GPGESSGESPGGSSGSES | | AAGGCGGTCCAGGTAGCGAAGGTT | |
| | | | CTTCTGGTCCAGGCGAATCTTCAGG | |
| | | | TGAATCTCCTGGTGGCTCCAGCGGT | |
| | | | TCTGAGTCA | |
| LCW0401_016_GFP- | GSSESGSSEGGPGSSESG | 165 | GGTTCCTCCGAAAGCGGTTCTTCTG | 166 |
| N_B02.ab1 | SSEGGPGSSESGSSEGGP | | AGGGCGGTCCAGGTTCCTCCGAAA | |
| | | | GCGGTTCTTCCGAGGGCGGTCCAG | |
| | | | GTTCTTCTGAAAGCGGTTCTTCCGA | |
| | | | GGGCGGTCCA | |
| LCW0401_020_GFP- | GSGGEPSESGSSGSEGSS | 167 | GGTTCCGGTGGCGAACCGTCCGAA | 168 |
| N_E02.ab1 | GPGESSGSSESGSSEGGP | | TCTGGTAGCTCAGGTAGCGAAGGT | |
| | | | TCTTCTGGTCCAGGCGAATCTTCAG | |
| | | | GTTCCTCTGAAAGCGGTTCTTCTGA | |
| | | | GGGCGGTCCA | |
| LCW0401_022_GFP- | GSGGEPSESGSSGSSESG | 169 | GGTTCTGGTGGTGAACCGTCCGAA | 170 |
| N_F02.ab1 | SSEGGPGSGGEPSESGSS | | TCTGGTAGCTCAGGTTCTTCCGAAA | |
| | | | GCGGTTCTTCTGAAGGTGGTCCAG | |
| | | | GTTCCGGTGGCGAACCTTCTGAATC | |
| | | | TGGTAGCTCA | |
| LCW0401_024_GFP- | GSGGEPSESGSSGSSESG | 171 | GGTTCTGGTGGCGAACCGTCCGAA | 172 |
| N_G02.ab1 | SSEGGPGESPGGSSGSES | | TCTGGTAGCTCAGGTTCCTCCGAAA | |
| | | | GCGGTTCTTCTGAAGGTGGTCCAG | |
| | | | GTGAATCTCCAGGTGGTTCTAGCG | |
| | | | GTTCTGAATCA | |
| LCW0401_026_GFP- | GSGGEPSESGSSGESPGG | 173 | GGTTCTGGTGGCGAACCGTCTGAG | 174 |
| N_H02.ab1 | SSGSESGSEGSSGPGESS | | TCTGGTAGCTCAGGTGAATCTCCTG | |
| | | | GTGGCTCCAGCGGTTCTGAATCAG | |
| | | | GTAGCGAAGGTTCTTCTGGTCCTGG | |
| | | | TGAATCTTCA | |
| LCW0401_027_GFP- | GSGGEPSESGSSGESPGG | 175 | GGTTCCGGTGGCGAACCTTCCGAA | 176 |
| N_A03.ab1 | SSGSESGSGGEPSESGSS | | TCTGGTAGCTCAGGTGAATCTCCG | |
| | | | GGTGGTTCTAGCGGTTCTGAGTCA | |
| | | | GGTTCTGGTGGTGAACCTTCCGAGT | |
| | | | CTGGTAGCTCA | |
| LCW0401_028_GFP- | GSSESGSSEGGPGSSESG | 177 | GGTTCCTCTGAAAGCGGTTCTTCTG | 178 |
| N_B03.ab1 | SSEGGPGSSESGSSEGGP | | AGGGCGGTCCAGGTTCTTCCGAAA | |
| | | | GCGGTTCTTCCGAGGGCGGTCCAG | |
| | | | GTTCTTCCGAAAGCGGTTCTTCTGA | |
| | | | AGGCGGTCCA | |
| LCW0401_030_GFP- | GESPGGSSGSESGSEGSS | 179 | GGTGAATCTCCGGGTGGCTCCAGC | 180 |
| N_C03.ab1 | GPGESSGSEGSSGPGESS | | GGTTCTGAGTCAGGTAGCGAAGGT | |
| | | | TCTTCCGGTCCGGGTGAGTCCTCAG | |
| | | | GTAGCGAAGGTTCTTCCGGTCCTG | |
| | | | GTGAGTCTTCA | |
| LCW0401_031_GFP- | GSGGEPSESGSSGSGGEP | 181 | GGTTCTGGTGGCGAACCTTCCGAA | 182 |
| N_D03.ab1 | SESGSSGSSESGSSEGGP | | TCTGGTAGCTCAGGTTCCGGTGGTG | |
| | | | AACCTTCTGAATCTGGTAGCTCAG | |
| | | | GTTCTTCTGAAAGCGGTTCTTCCGA | |
| | | | GGGCGGTCCA | |
| LCW0401_033_GFP- | GSGGEPSESGSSGSGGEP | 183 | GGTTCCGGTGGTGAACCTTCTGAAT | 184 |
| N_E03.ab1 | SESGSSGSGGEPSESGSS | | CTGGTAGCTCAGGTTCCGGTGGCG | |
| | | | AACCATCCGAGTCTGGTAGCTCAG | |
| | | | GTTCCGGTGGTGAACCATCCGAGT | |
| | | | CTGGTAGCTCA | |
| LCW0401_037_GFP- | GSGGEPSESGSSGSSESG | 185 | GGTTCCGGTGGCGAACCTTCTGAA | 186 |
| N_F03.ab1 | SSEGGPGSEGSSGPGESS | | TCTGGTAGCTCAGGTTCCTCCGAAA | |
| | | | GCGGTTCTTCTGAGGGCGGTCCAG | |
| | | | GTAGCGAAGGTTCTTCTGGTCCGG | |
| | | | GCGAGTCTTCA | |
| LCW0401_038_GFP- | GSGGEPSESGSSGSEGSS | 187 | GGTTCCGGTGGTGAACCGTCCGAG | 188 |
| N_G03.ab1 | GPGESSGSGGEPSESGSS | | TCTGGTAGCTCAGGTAGCGAAGGT | |
| | | | TCTTCTGGTCCGGGTGAGTCTTCAG | |
| | | | GTTCTGGTGGCGAACCGTCCGAAT | |
| | | | CTGGTAGCTCA | |
| LCW0401_039_GFP- | GSGGEPSESGSSGESPGG | 189 | GGTTCTGGTGGCGAACCGTCCGAA | 190 |
| N_H03.ab1 | SSGSESGSGGEPSESGSS | | TCTGGTAGCTCAGGTGAATCTCCTG | |
| | | | GTGGTTCCAGCGGTTCCGAGTCAG | |
| | | | GTTCTGGTGGCGAACCTTCCGAATC | |
| | | | TGGTAGCTCA | |
| LCW0401_040_GFP- | GSSESGSSEGGPGSGGEP | 191 | GGTTCTTCCGAAAGCGGTTCTTCCG | 192 |
| N_A04.ab1 | SESGSSGSSESGSSEGGP | | AGGGCGGTCCAGGTTCCGGTGGTG | |
| | | | AACCATCTGAATCTGGTAGCTCAG | |
| | | | GTTCTTCTGAAAGCGGTTCTTCTGA | |
| | | | AGGTGGTCCA | |
| LCW0401_042_GFP- | GSEGSSGPGESSGESPGG | 193 | GGTAGCGAAGGTTCTTCCGGTCCT | 194 |
| N_C04.ab1 | SSGSESGSEGSSGPGESS | | GGTGAGTCTTCAGGTGAATCTCCA | |
| | | | GGTGGCTCTAGCGGTTCCGAGTCA | |
| | | | GGTAGCGAAGGTTCTTCTGGTCCTG | |
| | | | GCGAGTCCTCA | |
| LCW0401_046_GFP- | GSSESGSSEGGPGSSESG | 195 | GGTTCCTCTGAAAGCGGTTCTTCCG | 196 |
| N_D04.ab1 | SSEGGPGSSESGSSEGGP | | AAGGCGGTCCAGGTTCTTCCGAAA | |
| | | | GCGGTTCTTCTGAGGGCGGTCCAG | |
| | | | GTTCCTCCGAAAGCGGTTCTTCTGA | |
| | | | GGGTGGTCCA | |
| LCW0401_047_GFP- | GSGGEPSESGSSGESPGG | 197 | GGTTCTGGTGGCGAACCTTCCGAG | 198 |
| N_E04.ab1 | SSGSESGESPGGSSGSES | | TCTGGTAGCTCAGGTGAATCTCCG | |
| | | | GGTGGTTCTAGCGGTTCCGAGTCA | |
| | | | GGTGAATCTCCGGGTGGTTCCAGC | |
| | | | GGTTCTGAGTCA | |
| LCW0401_051_GFP- | GSGGEPSESGSSGSEGSS | 199 | GGTTCTGGTGGCGAACCATCTGAG | 200 |
| N_F04.ab1 | GPGESSGESPGGSSGSES | | TCTGGTAGCTCAGGTAGCGAAGGT | |
| | | | TCTTCCGGTCCAGGCGAGTCTTCAG | |
| | | | GTGAATCTCCTGGTGGCTCCAGCG | |
| | | | GTTCTGAGTCA | |
| LCW0401_053_GFP- | GESPGGSSGSESGESPGG | 201 | GGTGAATCTCCTGGTGGTTCCAGC | 202 |
| N_H04.ab1 | SSGSESGESPGGSSGSES | | GGTTCCGAGTCAGGTGAATCTCCA | |
| | | | GGTGGCTCTAGCGGTTCCGAGTCA | |
| | | | GGTGAATCTCCTGGTGGTTCTAGCG | |
| | | | GTTCTGAATCA | |
| LCW0401_054_GFP- | GSEGSSGPGESSGSEGSS | 203 | GGTAGCGAAGGTTCTTCCGGTCCA | 204 |
| N_A05.ab1 | GPGESSGSGGEPSESGSS | | GGTGAATCTTCAGGTAGCGAAGGT | |
| | | | TCTTCTGGTCCTGGTGAATCCTCAG | |
| | | | GTTCCGGTGGCGAACCATCTGAAT | |
| | | | CTGGTAGCTCA | |
| LCW0401_059_GFP- | GSGGEPSESGSSGSEGSS | 205 | GGTTCTGGTGGCGAACCATCCGAA | 206 |
| N_D05.ab1 | GPGESSGESPGGSSGSES | | TCTGGTAGCTCAGGTAGCGAAGGT | |
| | | | TCTTCTGGTCCTGGCGAATCTTCAG | |
| | | | GTGAATCTCCAGGTGGCTCTAGCG | |
| | | | GTTCCGAATCA | |
| LCW0401_060_GFP- | GSGGEPSESGSSGSSESG | 207 | GGTTCCGGTGGTGAACCGTCCGAA | 208 |
| N_E05.ab1 | SSEGGPGSGGEPSESGSS | | TCTGGTAGCTCAGGTTCCTCTGAAA | |
| | | | GCGGTTCTTCCGAGGGTGGTCCAG | |
| | | | GTTCCGGTGGTGAACCTTCTGAGTC | |
| | | | TGGTAGCTCA | |
| LCW0401_061_GFP- | GSSESGSSEGGPGSGGEP | 209 | GGTTCCTCTGAAAGCGGTTCTTCTG | 210 |
| N_F05.ab1 | SESGSSGSEGSSGPGESS | | AGGGCGGTCCAGGTTCTGGTGGCG | |
| | | | AACCATCTGAATCTGGTAGCTCAG | |
| | | | GTAGCGAAGGTTCTTCCGGTCCGG | |
| | | | GTGAATCTTCA | |
| LCW0401_063_GFP- | GSGGEPSESGSSGSEGSS | 211 | GGTTCTGGTGGTGAACCGTCCGAA | 212 |
| N_H05.ab1 | GPGESSGSEGSSGPGESS | | TCTGGTAGCTCAGGTAGCGAAGGT | |
| | | | TCTTCTGGTCCTGGCGAGTCTTCAG | |
| | | | GTAGCGAAGGTTCTTCTGGTCCTGG | |
| | | | TGAATCTTCA | |
| LCW0401_066_GFP- | GSGGEPSESGSSGSSESG | 213 | GGTTCTGGTGGCGAACCATCCGAG | 214 |
| N_B06.ab1 | SSEGGPGSGGEPSESGSS | | TCTGGTAGCTCAGGTTCTTCCGAAA | |
| | | | GCGGTTCTTCCGAAGGCGGTCCAG | |
| | | | GTTCTGGTGGTGAACCGTCCGAAT | |
| | | | CTGGTAGCTCA | |
| LCW0401_067_GFP- | GSGGEPSESGSSGESPGG | 215 | GGTTCCGGTGGCGAACCTTCCGAA | 216 |
| N_C06.ab1 | SSGSESGESPGGSSGSES | | TCTGGTAGCTCAGGTGAATCTCCG | |
| | | | GGTGGTTCTAGCGGTTCCGAATCA | |
| | | | GGTGAATCTCCAGGTGGTTCTAGC | |
| | | | GGTTCCGAATCA | |
| LCW0401_069_GFP- | GSGGEPSESGSSGSGGEP | 217 | GGTTCCGGTGGTGAACCATCTGAG | 218 |
| N_D06.ab1 | SESGSSGESPGGSSGSES | | TCTGGTAGCTCAGGTTCCGGTGGC | |
| | | | GAACCGTCCGAGTCTGGTAGCTCA | |
| | | | GGTGAATCTCCGGGTGGTTCCAGC | |
| | | | GGTTCCGAATCA | |
| LCW0401_070_GFP- | GSEGSSGPGESSGSSESG | 219 | GGTAGCGAAGGTTCTTCTGGTCCG | 220 |
| N_E06.ab1 | SSEGGPGSEGSSGPGESS | | GGCGAATCCTCAGGTTCCTCCGAA | |
| | | | AGCGGTTCTTCCGAAGGTGGTCCA | |
| | | | GGTAGCGAAGGTTCTTCCGGTCCT | |
| | | | GGTGAATCTTCA | |
| LCW0401_078_GFP- | GSSESGSSEGGPGESPGG | 221 | GGTTCCTCTGAAAGCGGTTCTTCTG | 222 |
| N_F06.ab1 | SSGSESGESPGGSSGSES | | AAGGCGGTCCAGGTGAATCTCCGG | |
| | | | GTGGCTCCAGCGGTTCTGAATCAG | |
| | | | GTGAATCTCCTGGTGGCTCCAGCG | |
| | | | GTTCCGAGTCA | |
| LCW0401_079_GFP- | GSEGSSGPGESSGSEGSS | 223 | GGTAGCGAAGGTTCTTCTGGTCCA | 224 |
| N_G06.ab1 | GPGESSGSGGEPSESGSS | | GGCGAGTCTTCAGGTAGCGAAGGT | |
| | | | TCTTCCGGTCCTGGCGAGTCTTCAG | |
| | | | GTTCCGGTGGCGAACCGTCCGAAT | |
| | | | CTGGTAGCTCA | |

### Example 2

### Construction of XTEN_AE36 Segments

[0313] A codon library encoding XTEN sequences of 36 amino acid length was constructed. The XTEN sequence was designated XTEN_AE36. Its segments have the amino acid sequence [X]₃ where X is a 12mer peptide with the sequence: GSPAGSPTSTEE (SEQ ID NO: 225), GSEPATSGSE TP (SEQ ID NO: 226), GTSESA TPESGP (SEQ ID NO: 227), or GTSTEPSEGSAP (SEQ ID NO: 228). The insert was obtained by annealing the following pairs of phosphorylated synthetic oligonucleotide pairs:

AE1for:

(SEQ ID NO: 229)

AGGTAGCCCDGCWGGYTCTCCDACYTCYACYGARGA
AE1rev:

(SEQ ID NO: 230)

ACCTTCYTCRGTRGARGTHGGAGARCCWGCHGGGCT
AE2for:

(SEQ ID NO: 231)

AGGTAGCGAACCKGCWACYTCYGGYTCTGARACYCC
AE2rev:

(SEQ ID NO: 232)

ACCTGGRGTYTCAGARCCRGARGTWGCMGGTTCGCT
AE3for:

(SEQ ID NO: 233)

AGGTACYTCTGAAAGCGCWACYCCKGARTCYGGYCC
AE3rev:

(SEQ ID NO: 234)

ACCTGGRCCRGAYTCMGGRGTWGCGCTTTCAGARGT
AE4for:

(SEQ ID NO: 235)

AGGTACYTCTACYGAACCKTCYGARGGYAGCGCWCC
AE4rev:

(SEQ ID NO: 236)

ACCTGGWGCGCTRCCYTCRGAMGGTTCRGTAGARGT

[0314] We also annealed the phosphorylated oligonucleotide 3KpnIstopperFor: AGGTTCGTCTTCACTCGAGGGTAC (SEQ ID NO: 237) and the non-phosphorylated oligonucleotide pr_3KpnIstopperRev: CCTCGAGTGAAGACGA (SEQ ID NO: 238). The annealed oligonucleotide pairs were ligated, which resulted in a mixture of products with varying length that represents the varying number of 12mer repeats ligated to one BbsI/KpnI segment. The products corresponding to the length of 36 amino acids were isolated from the mixture by preparative agarose gel electrophoresis and ligated into the BsaI/KpnI digested stuffer vector pCW0359. Most of the clones in the resulting library designated LCW0402 showed green fluorescence after induction which shows that the sequence of XTEN_AE36 had been ligated in frame with the GFP gene and most sequences of XTEN_AE36 show good expression.

[0315] We screened 96 isolates from library LCW0402 for high level of fluorescence by stamping them onto agar plate containing IPTG. The same isolates were evaluated by PCR and 48 isolates were identified that contained segments with 36 amino acids as well as strong fluorescence. These isolates were sequenced and 37 clones were identified that contained correct XTEN_AE36 segments. The file names of the nucleotide and amino acid constructs for these segments are listed in Table 9.

TABLE 9
DNA and Amino Acid Sequences for 36-mer motifs

| | | SEQ ID | | SEQ ID |
|---|---|---|---|---|
| File name | Amino acid sequence | NO: | Nucleotide sequence | NO: |
| LCW0402_002_GFP- | GSPAGSPTSTEEGTSE | 239 | GGTAGCCCGGCAGGCTCTCCGACCT | 240 |
| N_A07.ab1 | SATPESGPGTSTEPSE | | CTACTGAGGAAGGTACTTCTGAAAG | |
| | GSAP | | CGCAACCCCGGAGTCCGGCCCAGGT | |
| | | | ACCTCTACCGAACCGTCTGAGGGCA | |
| | | | GCGCACCA | |
| LCW0402_003_GFP- | GTSTEPSEGSAPGTST | 241 | GGTACTTCTACCGAACCGTCCGAAG | 242 |
| N_B07.ab1 | EPSEGSAPGTSTEPSE | | GCAGCGCTCCAGGTACCTCTACTGA | |
| | GSAP | | ACCTTCCGAGGGCAGCGCTCCAGGT | |
| | | | ACCTCTACCGAACCTTCTGAAGGTA | |
| | | | GCGCACCA | |
| LCW0402_004_GFP- | GTSTEPSEGSAPGTSE | 243 | GGTACCTCTACCGAACCGTCTGAAG | 244 |
| N_C07.ab1 | SATPESGPGTSESATP | | GTAGCGCACCAGGTACCTCTGAAAG | |
| | ESGP | | CGCAACTCCTGAGTCCGGTCCAGGT | |
| | | | ACTTCTGAAAGCGCAACCCCGGAGT | |
| | | | CTGGCCCA | |
| LCW0402_005_GFP- | GTSTEPSEGSAPGTSE | 245 | GGTACTTCTACTGAACCGTCTGAAG | 246 |
| N_D07.ab1 | SATPESGPGTSESATP | | GTAGCGCACCAGGTACTTCTGAAAG | |
| | ESGP | | CGCAACCCCGGAATCCGGCCCAGGT | |
| | | | ACCTCTGAAAGCGCAACCCCGGAGT | |
| | | | CCGGCCCA | |
| LCW0402_006_GFP- | GSEPATSGSETPGTSE | 247 | GGTAGCGAACCGGCAACCTCCGGCT | 248 |
| N_E07.ab1 | SATPESGPGSPAGSPT | | CTGAAACCCCAGGTACCTCTGAAAG | |
| | STEE | | CGCTACTCCTGAATCCGGCCCAGGT | |
| | | | AGCCCGGCAGGTTCTCCGACTTCCA | |
| | | | CTGAGGAA | |
| LCW0402_008_GFP- | GTSESATPESGPGSEP | 249 | GGTACTTCTGAAAGCGCAACCCCTG | 250 |
| N_F07.ab1 | ATSGSETPGTSTEPSE | | AATCCGGTCCAGGTAGCGAACCGGC | |
| | GSAP | | TACTTCTGGCTCTGAGACTCCAGGT | |
| | | | ACTTCTACCGAACCGTCCGAAGGTA | |
| | | | GCGCACCA | |
| LCW0402_009_GFP- | GSPAGSPTSTEEGSPA | 251 | GGTAGCCCGGCTGGCTCTCCAACCT | 252 |
| N_G07.ab1 | GSPTSTEEGSEPATSG | | CCACTGAGGAAGGTAGCCCGGCTGG | |
| | SETP | | CTCTCCAACCTCCACTGAAGAAGGT | |
| | | | AGCGAACCGGCTACCTCCGGCTCTG | |
| | | | AAACTCCA | |
| LCW0402_011_GFP- | GSPAGSPTSTEEGTSE | 253 | GGTAGCCCGGCTGGCTCTCCTACCT | 254 |
| N_A08.ab1 | SATPESGPGTSTEPSE | | CTACTGAGGAAGGTACTTCTGAAAG | |
| | GSAP | | CGCTACTCCTGAGTCTGGTCCAGGT | |
| | | | ACCTCTACTGAACCGTCCGAAGGTA | |
| | | | GCGCTCCA | |
| LCW0402_012_GFP- | GSPAGSPTSTEEGSPA | 255 | GGTAGCCCTGCTGGCTCTCCGACTT | 256 |
| N_B08.ab1 | GSPTSTEEGTSTEPSE | | CTACTGAGGAAGGTAGCCCGGCTGG | |
| | GSAP | | TTCTCCGACTTCTACTGAGGAAGGT | |
| | | | ACTTCTACCGAACCTTCCGAAGGTA | |
| | | | GCGCTCCA | |
| LCW0402_013_GFP- | GTSESATPESGPGTST | 257 | GGTACTTCTGAAAGCGCTACTCCGG | 258 |
| N_C08.ab1 | EPSEGSAPGTSTEPSE | | AGTCCGGTCCAGGTACCTCTACCGA | |
| | GSAP | | ACCGTCCGAAGGCAGCGCTCCAGGT | |
| | | | ACTTCTACTGAACCTTCTGAGGGTA | |
| | | | GCGCTCCA | |
| LCW0402_014_GFP- | GTSTEPSEGSAPGSPA | 259 | GGTACCTCTACCGAACCTTCCGAAG | 260 |
| N_D08.ab1 | GSPTSTEEGTSTEPSE | | GTAGCGCTCCAGGTAGCCCGGCAGG | |
| | GSAP | | TTCTCCTACTTCCACTGAGGAAGGT | |
| | | | ACTTCTACCGAACCTTCTGAGGGTA | |
| | | | GCGCACCA | |
| LCW0402_015_GFP- | GSEPATSGSETPGSPA | 261 | GGTAGCGAACCGGCTACTTCCGGCT | 262 |
| N_E08.ab1 | GSPTSTEEGTSESATP | | CTGAGACTCCAGGTAGCCCTGCTGG | |
| | ESGP | | CTCTCCGACCTCTACCGAAGAAGGT | |
| | | | ACCTCTGAAAGCGCTACCCCTGAGT | |
| | | | CTGGCCCA | |
| LCW0402_016_GFP- | GTSTEPSEGSAPGTSE | 263 | GGTACTTCTACCGAACCTTCCGAGG | 264 |
| N_F08.ab1 | SATPESGPGTSESATP | | GCAGCGCACCAGGTACTTCTGAAAG | |
| | ESGP | | CGCTACCCCTGAGTCCGGCCCAGGT | |
| | | | ACTTCTGAAAGCGCTACTCCTGAAT | |
| | | | CCGGTCCA | |
| LCW0402_020_GFP- | GTSTEPSEGSAPGSEP | 265 | GGTACTTCTACTGAACCGTCTGAAG | 266 |
| N_G08.ab1 | ATSGSETPGSPAGSPT | | GCAGCGCACCAGGTAGCGAACCGG | |
| | STEE | | CTACTTCCGGTTCTGAAACCCCAGG | |
| | | | TAGCCCAGCAGGTTCTCCAACTTCT | |
| | | | ACTGAAGAA | |
| LCW0402_023_GFP- | GSPAGSPTSTEEGTSE | 267 | GGTAGCCCTGCTGGCTCTCCAACCT | 268 |
| N_A09.ab1 | SATPESGPGSEPATSG | | CCACCGAAGAAGGTACCTCTGAAAG | |
| | SETP | | CGCAACCCCTGAATCCGGCCCAGGT | |
| | | | AGCGAACCGGCAACCTCCGGTTCTG | |
| | | | AAACCCCA | |
| LCW0402_024_GFP- | GTSESATPESGPGSPA | 269 | GGTACTTCTGAAAGCGCTACTCCTG | 270 |
| N_B09.ab1 | GSPTSTEEGSPAGSPT | | AGTCCGGCCCAGGTAGCCCGGCTGG | |
| | STEE | | CTCTCCGACTTCCACCGAGGAAGGT | |
| | | | AGCCCGGCTGGCTCTCCAACTTCTA | |
| | | | CTGAAGAA | |
| LCW0402_025_GFP- | GTSTEPSEGSAPGTSE | 271 | GGTACCTCTACTGAACCTTCTGAGG | 272 |
| N_C09.ab1 | SATPESGPGTSTEPSE | | GCAGCGCTCCAGGTACTTCTGAAAG | |
| | GSAP | | CGCTACCCCGGAGTCCGGTCCAGGT | |
| | | | ACTTCTACTGAACCGTCCGAAGGTA | |
| | | | GCGCACCA | |
| LCW0402_026_GFP- | GSPAGSPTSTEEGTST | 273 | GGTAGCCCGGCAGGCTCTCCGACTT | 274 |
| N_D09.ab1 | EPSEGSAPGSEPATSG | | CCACCGAGGAAGGTACCTCTACTGA | |
| | SETP | | ACCTTCTGAGGGTAGCGCTCCAGGT | |
| | | | AGCGAACCGGCAACCTCTGGCTCTG | |
| | | | AAACCCCA | |
| LCW0402_027_GFP- | GSPAGSPTSTEEGTST | 275 | GGTAGCCCAGCAGGCTCTCCGACTT | 276 |
| N_E09.ab1 | EPSEGSAPGTSTEPSE | | CCACTGAGGAAGGTACTTCTACTGA | |
| | GSAP | | ACCTTCCGAAGGCAGCGCACCAGGT | |
| | | | ACCTCTACTGAACCTTCTGAGGGCA | |
| | | | GCGCTCCA | |
| LCW0402_032_GFP- | GSEPATSGSETPGTSE | 277 | GGTAGCGAACCTGCTACCTCCGGTT | 278 |
| N_H09.ab1 | SATPESGPGSPAGSPT | | CTGAAACCCCAGGTACCTCTGAAAG | |
| | STEE | | CGCAACTCCGGAGTCTGGTCCAGGT | |
| | | | AGCCCTGCAGGTTCTCCTACCTCCA | |
| | | | CTGAGGAA | |
| LCW0402_034_GFP- | GTSESATPESGPGTST | 279 | GGTACCTCTGAAAGCGCTACTCCGG | 280 |
| N_A10.ab1 | EPSEGSAPGTSTEPSE | | AGTCTGGCCCAGGTACCTCTACTGA | |
| | GSAP | | ACCGTCTGAGGGTAGCGCTCCAGGT | |
| | | | ACTTCTACTGAACCGTCCGAAGGTA | |
| | | | GCGCACCA | |
| LCW0402_036_GFP- | GSPAGSPTSTEEGTST | 281 | GGTAGCCCGGCTGGTTCTCCGACTT | 282 |
| N_C10.ab1 | EPSEGSAPGTSTEPSE | | CCACCGAGGAAGGTACCTCTACTGA | |
| | GSAP | | ACCTTCTGAGGGTAGCGCTCCAGGT | |
| | | | ACCTCTACTGAACCTTCCGAAGGCA | |
| | | | GCGCTCCA | |
| LCW0402_039_GFP- | GTSTEPSEGSAPGTST | 283 | GGTACTTCTACCGAACCGTCCGAGG | 284 |
| N_E10.ab1 | EPSEGSAPGTSTEPSE | | GCAGCGCTCCAGGTACTTCTACTGA | |
| | GSAP | | ACCTTCTGAAGGCAGCGCTCCAGGT | |
| | | | ACTTCTACTGAACCTTCCGAAGGTA | |
| | | | GCGCACCA | |
| LCW0402_040_GFP- | GSEPATSGSETPGTSE | 285 | GGTAGCGAACCTGCAACCTCTGGCT | 286 |
| N_F10.ab1 | SATPESGPGTSTEPSE | | CTGAAACCCCAGGTACCTCTGAAAG | |
| | GSAP | | CGCTACTCCTGAATCTGGCCCAGGT | |
| | | | ACTTCTACTGAACCGTCCGAGGGCA | |
| | | | GCGCACCA | |
| LCW0402_041_GFP- | GTSTEPSEGSAPGSPA | 287 | GGTACTTCTACCGAACCGTCCGAGG | 288 |
| N_G10.ab1 | GSPTSTEEGTSTEPSE | | GTAGCGCACCAGGTAGCCCAGCAG | |
| | GSAP | | GTTCTCCTACCTCCACCGAGGAAGG | |
| | | | TACTTCTACCGAACCGTCCGAGGGT | |
| | | | AGCGCACCA | |
| LCW0402_050_GFP- | GSEPATSGSETPGTSE | 289 | GGTAGCGAACCGGCAACCTCCGGCT | 290 |
| N_A11.ab1 | SATPESGPGSEPATSG | | CTGAAACTCCAGGTACTTCTGAAAG | |
| | SETP | | CGCTACTCCGGAATCCGGCCCAGGT | |
| | | | AGCGAACCGGCTACTTCCGGCTCTG | |
| | | | AAACCCCA | |
| LCW0402_051_GFP- | GSEPATSGSETPGTSE | 291 | GGTAGCGAACCGGCAACTTCCGGCT | 292 |
| N_B11.ab1 | SATPESGPGSEPATSG | | CTGAAACCCCAGGTACTTCTGAAAG | |
| | SETP | | CGCTACTCCTGAGTCTGGCCCAGGT | |
| | | | AGCGAACCTGCTACCTCTGGCTCTG | |
| | | | AAACCCCA | |
| LCW0402_059_GFP- | GSEPATSGSETPGSEP | 293 | GGTAGCGAACCGGCAACCTCTGGCT | 294 |
| N_E11.ab1 | ATSGSETPGTSTEPSE | | CTGAAACTCCAGGTAGCGAACCTGC | |
| | GSAP | | AACCTCCGGCTCTGAAACCCCAGGT | |
| | | | ACTTCTACTGAACCTTCTGAGGGCA | |
| | | | GCGCACCA | |
| LCW0402_060_GFP- | GTSESATPESGPGSEP | 295 | GGTACTTCTGAAAGCGCTACCCCGG | 296 |
| N_F11.ab1 | ATSGSETPGSEPATSG | | AATCTGGCCCAGGTAGCGAACCGGC | |
| | SETP | | TACTTCTGGTTCTGAAACCCCAGGT | |
| | | | AGCGAACCGGCTACCTCCGGTTCTG | |
| | | | AAACTCCA | |
| LCW0402_061_GFP- | GTSTEPSEGSAPGTST | 297 | GGTACCTCTACTGAACCTTCCGAAG | 298 |
| N_G11.ab1 | EPSEGSAPGTSESATP | | GCAGCGCTCCAGGTACCTCTACCGA | |
| | ESGP | | ACCGTCCGAGGGCAGCGCACCAGGT | |
| | | | ACTTCTGAAAGCGCAACCCCTGAAT | |
| | | | CCGGTCCA | |
| LCW0402_065_GFP- | GSEPATSGSETPGTSE | 299 | GGTAGCGAACCGGCAACCTCTGGCT | 300 |
| N_A12.ab1 | SATPESGPGTSESATP | | CTGAAACCCCAGGTACCTCTGAAAG | |
| | ESGP | | CGCTACTCCGGAATCTGGTCCAGGT | |
| | | | ACTTCTGAAAGCGCTACTCCGGAAT | |
| | | | CCGGTCCA | |
| LCW0402_066_GFP- | GSEPATSGSETPGSEP | 301 | GGTAGCGAACCTGCTACCTCCGGCT | 302 |
| N_B12.ab1 | ATSGSETPGTSTEPSE | | CTGAAACTCCAGGTAGCGAACCGGC | |
| | GSAP | | TACTTCCGGTTCTGAAACTCCAGGT | |
| | | | ACCTCTACCGAACCTTCCGAAGGCA | |
| | | | GCGCACCA | |
| LCW0402_067_GFP- | GSEPATSGSETPGTST | 303 | GGTAGCGAACCTGCTACTTCTGGTT | 304 |
| N_C12.ab1 | EPSEGSAPGSEPATSG | | CTGAAACTCCAGGTACTTCTACCGA | |
| | SETP | | ACCGTCCGAGGGTAGCGCTCCAGGT | |
| | | | AGCGAACCTGCTACTTCTGGTTCTG | |
| | | | AAACTCCA | |
| LCW0402_069_GFP- | GTSTEPSEGSAPGTST | 305 | GGTACCTCTACCGAACCGTCCGAGG | 306 |
| N_D12.ab1 | EPSEGSAPGSEPATSG | | GTAGCGCACCAGGTACCTCTACTGA | |
| | SETP | | ACCGTCTGAGGGTAGCGCTCCAGGT | |
| | | | AGCGAACCGGCAACCTCCGGTTCTG | |
| | | | AAACTCCA | |
| LCW0402_073_GFP- | GTSTEPSEGSAPGSEP | 307 | GGTACTTCTACTGAACCTTCCGAAG | 308 |
| N_F12.ab1 | ATSGSETPGSPAGSPT | | GTAGCGCTCCAGGTAGCGAACCTGC | |
| | STEE | | TACTTCTGGTTCTGAAACCCCAGGT | |
| | | | AGCCCGGCTGGCTCTCCGACCTCCA | |
| | | | CCGAGGAA | |
| LCW0402_074_GFP- | GSEPATSGSETPGSPA | 309 | GGTAGCGAACCGGCTACTTCCGGCT | 310 |
| N_G12.ab1 | GSPTSTEEGTSESATP | | CTGAGACTCCAGGTAGCCCAGCTGG | |
| | ESGP | | TTCTCCAACCTCTACTGAGGAAGGT | |
| | | | ACTTCTGAAAGCGCTACCCCTGAAT | |
| | | | CTGGTCCA | |
| LCW0402_075_GFP- | GTSESATPESGPGSEP | 311 | GGTACCTCTGAAAGCGCAACTCCTG | 312 |
| N_H12.ab1 | ATSGSETPGTSESATP | | AGTCTGGCCCAGGTAGCGAACCTGC | |
| | ESGP | | TACCTCCGGCTCTGAGACTCCAGGT | |
| | | | ACCTCTGAAAGCGCAACCCCGGAAT | |
| | | | CTGGTCCA | |

### Example 3

### Construction of XTEN_AF36 Segments

[0316] A codon library encoding sequences of 36 amino acid length was constructed. The sequences were designated XTEN_AF36. Its segments have the amino acid sequence [X]3 where X is a 12mer peptide with the sequence: GSTSESPSGTAP (SEQ ID NO: 313), GTSTPESGSASP (SEQ ID NO: 314), GTSPSGESSTAP (SEQ ID NO: 315), or GSTSSTAESPGP (SEQ ID NO: 316). The insert was obtained by annealing the following pairs of phosphorylated synthetic oligonucleotide pairs:

AF1for:

(SEQ ID NO: 317)

AGGTTCTACYAGCGAATCYCCKTCTGGYACYGCWCC
AF1rev:

(SEQ ID NO: 318)

ACCTGGWGCRGTRCCAGAMGGRGATTCGCTRGTAGA
AF2for:

(SEQ ID NO: 319)

AGGTACYTCTACYCCKGAAAGCGGYTCYGCWTCTCC
AF2rev:

(SEQ ID NO: 320)

ACCTGGAGAWGCRGARCCGCTTTCMGGRGTAGARGT
AF3for:

(SEQ ID NO: 321)

AGGTACYTCYCCKAGCGGYGAATCTTCTACYGCWCC
AF3rev:

(SEQ ID NO: 322)

ACCTGGWGCRGTAGAAGATTCRCCGCTMGGRGARGT
AF4for:

(SEQ ID NO: 323)

AGGTTCYACYAGCTCTACYGCWGAATCTCCKGGYCC
AF4rev:

(SEQ ID NO: 324)

ACCTGGRCCMGGAGATTCWGCRGTAGAGCTRGTRGA

[0317] We also annealed the phosphorylated oligonucleotide 3KpnIstopperFor: AGGTTCGTCTTCACTCGAGGGTAC (SEQ ID NO: 325) and the non-phosphorylated oligonucleotide pr_3KpnIstopperRev: CCTCGAGTGAAGACGA (SEQ ID NO: 326). The annealed oligonucleotide pairs were ligated, which resulted in a mixture of products with varying length that represents the varying number of 12mer repeats ligated to one BbsI/KpnI segment The products corresponding to the length of 36 amino acids were isolated from the mixture by preparative agarose gel electrophoresis and ligated into the BsaI/KpnI digested stuffer vector pCW0359. Most of the clones in the resulting library designated LCW0403 showed green fluorescence after induction which shows that the sequence of XTEN_AF36 had been ligated in frame with the GFP gene and most sequences of XTEN_AF36 show good expression.

[0318] We screened 96 isolates from library LCW0403 for high level of fluorescence by stamping them onto agar plate containing IPTG. The same isolates were evaluated by PCR and 48 isolates were identified that contained segments with 36 amino acids as well as strong fluorescence. These isolates were sequenced and 44 clones were identified that contained correct XTEN_AF36 segments. The file names of the nucleotide and amino acid constructs for these segments are listed in Table 10.

TABLE 10
DNA and Amino Acid Sequences for 36-mer motifs

| | | SEQ ID | | SEQ ID |
|---|---|---|---|---|
| File name | Amino acid sequence | NO: | Nucleotide sequence | NO: |
| LCW0403_004_GFP- | GTSTPESGSASPGTSP | 327 | GGTACTTCTACTCCGGAAAGCGGTTC | 328 |
| N_A01.ab1 | SGESSTAPGTSPSGES | | CGCATCTCCAGGTACTTCTCCTAGCG | |
| | STAP | | GTGAATCTTCTACTGCTCCAGGTACC | |
| | | | TCTCCTAGCGGCGAATCTTCTACTGC | |
| | | | TCCA | |
| LCW0403_005_GFP- | GTSPSGESSTAPGSTS | 329 | GGTACTTCTCCGAGCGGTGAATCTTC | 330 |
| N_B01.ab1 | STAESPGPGTSPSGES | | TACCGCACCAGGTTCTACTAGCTCTA | |
| | STAP | | CCGCTGAATCTCCGGGCCCAGGTACT | |
| | | | TCTCCGAGCGGTGAATCTTCTACTGC | |
| | | | TCCA | |
| LCW0403_006_GFP- | GSTSSTAESPGPGTSP | 331 | GGTTCCACCAGCTCTACTGCTGAATC | 332 |
| N_C01.ab1 | SGESSTAPGTSTPESG | | TCCTGGTCCAGGTACCTCTCCTAGCG | |
| | SASP | | GTGAATCTTCTACTGCTCCAGGTACT | |
| | | | TCTACTCCTGAAAGCGGCTCTGCTTC | |
| | | | TCCA | |
| LCW0403_007_GFP- | GSTSSTAESPGPGSTS | 333 | GGTTCTACCAGCTCTACTGCAGAATC | 334 |
| N_D01.ab1 | STAESPGPGTSPSGES | | TCCTGGCCCAGGTTCCACCAGCTCTA | |
| | STAP | | CCGCAGAATCTCCGGGTCCAGGTACT | |
| | | | TCCCCTAGCGGTGAATCTTCTACCGC | |
| | | | ACCA | |
| LCW0403_008_GFP- | GSTSSTAESPGPGTSP | 335 | GGTTCTACTAGCTCTACTGCTGAATC | 336 |
| N_E01.ab1 | SGESSTAPGTSTPESG | | TCCTGGCCCAGGTACTTCTCCTAGCG | |
| | SASP | | GTGAATCTTCTACCGCTCCAGGTACC | |
| | | | TCTACTCCGGAAAGCGGTTCTGCATC | |
| | | | TCCA | |
| LCW0403_010_GFP- | GSTSSTAESPGPGTST | 337 | GGTTCTACCAGCTCTACCGCAGAATC | 338 |
| N_F01.ab1 | PESGSASPGSTSESPS | | TCCTGGTCCAGGTACCTCTACTCCGG | |
| | GTAP | | AAAGCGGCTCTGCATCTCCAGGTTCT | |
| | | | ACTAGCGAATCTCCTTCTGGCACTGC | |
| | | | ACCA | |
| LCW0403_011_GFP- | GSTSSTAESPGPGTST | 339 | GGTTCTACTAGCTCTACTGCAGAATC | 340 |
| N_G01.ab1 | PESGSASPGTSTPESG | | TCCTGGCCCAGGTACCTCTACTCCGG | |
| | SASP | | AAAGCGGCTCTGCATCTCCAGGTACT | |
| | | | TCTACCCCTGAAAGCGGTTCTGCATC | |
| | | | TCCA | |
| LCW0403_012_GFP- | GSTSESPSGTAPGTSP | 341 | GGTTCTACCAGCGAATCTCCTTCTGG | 342 |
| N_H01.ab1 | SGESSTAPGSTSESPS | | CACCGCTCCAGGTACCTCTCCTAGCG | |
| | GTAP | | GCGAATCTTCTACCGCTCCAGGTTCT | |
| | | | ACTAGCGAATCTCCTTCTGGCACTGC | |
| | | | ACCA | |
| LCW0403_013_GFP- | GSTSSTAESPGPGSTS | 343 | GGTTCCACCAGCTCTACTGCAGAATC | 344 |
| N_A02.ab1 | STAESPGPGTSPSGES | | TCCGGGCCCAGGTTCTACTAGCTCTA | |
| | STAP | | CTGCAGAATCTCCGGGTCCAGGTACT | |
| | | | TCTCCTAGCGGCGAATCTTCTACCGC | |
| | | | TCCA | |
| LCW0403_014_GFP- | GSTSSTAESPGPGTST | 345 | GGTTCCACTAGCTCTACTGCAGAATC | 346 |
| N_B02.ab1 | PESGSASPGSTSESPS | | TCCTGGCCCAGGTACCTCTACCCCTG | |
| | GTAP | | AAAGCGGCTCTGCATCTCCAGGTTCT | |
| | | | ACCAGCGAATCCCCGTCTGGCACCGC | |
| | | | ACCA | |
| LCW0403_015_GFP- | GSTSSTAESPGPGSTS | 347 | GGTTCTACTAGCTCTACTGCTGAATC | 348 |
| N_C02.ab1 | STAESPGPGTSPSGES | | TCCGGGTCCAGGTTCTACCAGCTCTA | |
| | STAP | | CTGCTGAATCTCCTGGTCCAGGTACC | |
| | | | TCCCCGAGCGGTGAATCTTCTACTGC | |
| | | | ACCA | |
| LCW0403_017_GFP- | GSTSSTAESPGPGSTS | 349 | GGTTCTACCAGCTCTACCGCTGAATC | 350 |
| N_D02.ab1 | ESPSGTAPGSTSSTAE | | TCCTGGCCCAGGTTCTACCAGCGAAT | |
| | SPGP | | CCCCGTCTGGCACCGCACCAGGTTCT | |
| | | | ACTAGCTCTACCGCTGAATCTCCGGG | |
| | | | TCCA | |
| LCW0403_018_GFP- | GSTSSTAESPGPGSTS | 351 | GGTTCTACCAGCTCTACCGCAGAATC | 352 |
| N_E02.ab1 | STAESPGPGSTSSTAE | | TCCTGGCCCAGGTTCCACTAGCTCTA | |
| | SPGP | | CCGCTGAATCTCCTGGTCCAGGTTCT | |
| | | | ACTAGCTCTACCGCTGAATCTCCTGG | |
| | | | TCCA | |
| LCW0403_019_GFP- | GSTSESPSGTAPGSTS | 353 | GGTTCTACTAGCGAATCCCCTTCTGG | 354 |
| N_F02.ab1 | STAESPGPGSTSSTAE | | TACTGCTCCAGGTTCCACTAGCTCTA | |
| | SPGP | | CCGCTGAATCTCCTGGCCCAGGTTCC | |
| | | | ACTAGCTCTACTGCAGAATCTCCTGG | |
| | | | TCCA | |
| LCW0403_023_GFP- | GSTSESPSGTAPGSTS | 355 | GGTTCTACTAGCGAATCTCCTTCTGG | 356 |
| N_H02.ab1 | ESPSGTAPGSTSESPS | | TACCGCTCCAGGTTCTACCAGCGAAT | |
| | GTAP | | CCCCGTCTGGTACTGCTCCAGGTTCT | |
| | | | ACCAGCGAATCTCCTTCTGGTACTGC | |
| | | | ACCA | |
| LCW0403_024_GFP- | GSTSSTAESPGPGSTS | 357 | GGTTCCACCAGCTCTACTGCTGAATC | 358 |
| N_A03.ab1 | STAESPGPGSTSSTAE | | TCCTGGCCCAGGTTCTACCAGCTCTA | |
| | SPGP | | CTGCTGAATCTCCGGGCCCAGGTTCC | |
| | | | ACCAGCTCTACCGCTGAATCTCCGGG | |
| | | | TCCA | |
| LCW0403_025_GFP- | GSTSSTAESPGPGSTS | 359 | GGTTCCACTAGCTCTACCGCAGAATC | 360 |
| N_B03.ab1 | STAESPGPGTSPSGES | | TCCTGGTCCAGGTTCTACTAGCTCTA | |
| | STAP | | CTGCTGAATCTCCGGGTCCAGGTACC | |
| | | | TCCCCTAGCGGCGAATCTTCTACCGC | |
| | | | TCCA | |
| LCW0403_028_GFP- | GSSPSASTGTGPGSST | 361 | GGTTCTAGCCCTTCTGCTTCCACCGG | 362 |
| N_D03.ab1 | PSGATGSPGSSTPSGA | | TACCGGCCCAGGTAGCTCTACTCCGT | |
| | TGSP | | CTGGTGCAACTGGCTCTCCAGGTAGC | |
| | | | TCTACTCCGTCTGGTGCAACCGGCTC | |
| | | | CCCA | |
| LCW0403_029_GFP- | GTSPSGESSTAPGTST | 363 | GGTACTTCCCCTAGCGGTGAATCTTC | 364 |
| N_E03.ab1 | PESGSASPGSTSSTAE | | TACTGCTCCAGGTACCTCTACTCCGG | |
| | SPGP | | AAAGCGGCTCCGCATCTCCAGGTTCT | |
| | | | ACTAGCTCTACTGCTGAATCTCCTGG | |
| | | | TCCA | |
| LCW0403_030_GFP- | GSTSSTAESPGPGSTS | 365 | GGTTCTACTAGCTCTACCGCTGAATC | 366 |
| N_F03.ab1 | STAESPGPGTSTPESG | | TCCGGGTCCAGGTTCTACCAGCTCTA | |
| | SASP | | CTGCAGAATCTCCTGGCCCAGGTACT | |
| | | | TCTACTCCGGAAAGCGGTTCCGCTTC | |
| | | | TCCA | |
| LCW0403_031_GFP- | GTSPSGESSTAPGSTS | 367 | GGTACTTCTCCTAGCGGTGAATCTTC | 368 |
| N_G03.ab1 | STAESPGPGTSTPESG | | TACCGCTCCAGGTTCTACCAGCTCTA | |
| | SASP | | CTGCTGAATCTCCTGGCCCAGGTACT | |
| | | | TCTACCCCGGAAAGCGGCTCCGCTTC | |
| | | | TCCA | |
| LCW0403_033_GFP- | GSTSESPSGTAPGSTS | 369 | GGTTCTACTAGCGAATCCCCTTCTGG | 370 |
| N_H03.ab1 | STAESPGPGSTSSTAE | | TACTGCACCAGGTTCTACCAGCTCTA | |
| | SPGP | | CTGCTGAATCTCCGGGCCCAGGTTCC | |
| | | | ACCAGCTCTACCGCAGAATCTCCTGG | |
| | | | TCCA | |
| LCW0403_035_GFP- | GSTSSTAESPGPGSTS | 371 | GGTTCCACCAGCTCTACCGCTGAATC | 372 |
| N_A04.ab1 | ESPSGTAPGSTSSTAE | | TCCGGGCCCAGGTTCTACCAGCGAAT | |
| | SPGP | | CCCCTTCTGGCACTGCACCAGGTTCT | |
| | | | ACTAGCTCTACCGCAGAATCTCCGGG | |
| | | | CCCA | |
| LCW0403_036_GFP- | GSTSSTAESPGPGTSP | 373 | GGTTCTACCAGCTCTACTGCTGAATC | 374 |
| N_B04.ab1 | SGESSTAPGTSTPESG | | TCCGGGTCCAGGTACTTCCCCGAGCG | |
| | SASP | | GTGAATCTTCTACTGCACCAGGTACT | |
| | | | TCTACTCCGGAAAGCGGTTCCGCTTC | |
| | | | TCCA | |
| LCW0403_039_GFP- | GSTSESPSGTAPGSTS | 375 | GGTTCTACCAGCGAATCTCCTTCTGG | 376 |
| N_C04.ab1 | ESPSGTAPGTSPSGES | | CACCGCTCCAGGTTCTACTAGCGAAT | |
| | STAP | | CCCCGTCTGGTACCGCACCAGGTACT | |
| | | | TCTCCTAGCGGCGAATCTTCTACCGC | |
| | | | ACCA | |
| LCW0403_041_GFP- | GSTSESPSGTAPGSTS | 377 | GGTTCTACCAGCGAATCCCCTTCTGG | 378 |
| N_D04.ab1 | ESPSGTAPGTSTPESG | | TACTGCTCCAGGTTCTACCAGCGAAT | |
| | SASP | | CCCCTTCTGGCACCGCACCAGGTACT | |
| | | | TCTACCCCTGAAAGCGGCTCCGCTTC | |
| | | | TCCA | |
| LCW0403_044_GFP- | GTSTPESGSASPGSTS | 379 | GGTACCTCTACTCCTGAAAGCGGTTC | 380 |
| N_E04.ab1 | STAESPGPGSTSSTAE | | TGCATCTCCAGGTTCCACTAGCTCTA | |
| | SPGP | | CCGCAGAATCTCCGGGCCCAGGTTCT | |
| | | | ACTAGCTCTACTGCTGAATCTCCTGG | |
| | | | CCCA | |
| LCW0403_046_GFP- | GSTSESPSGTAPGSTS | 381 | GGTTCTACCAGCGAATCCCCTTCTGG | 382 |
| N_F04.ab1 | ESPSGTAPGTSPSGES | | CACTGCACCAGGTTCTACTAGCGAAT | |
| | STAP | | CCCCTTCTGGTACCGCACCAGGTACT | |
| | | | TCTCCGAGCGGCGAATCTTCTACTGC | |
| | | | TCCA | |
| LCW0403_047_GFP- | GSTSSTAESPGPGSTS | 383 | GGTTCTACTAGCTCTACCGCTGAATC | 384 |
| N_G04.ab1 | STAESPGPGSTSESPS | | TCCTGGCCCAGGTTCCACTAGCTCTA | |
| | GTAP | | CCGCAGAATCTCCGGGCCCAGGTTCT | |
| | | | ACTAGCGAATCCCCTTCTGGTACCGC | |
| | | | TCCA | |
| LCW0403_049_GFP- | GSTSSTAESPGPGSTS | 385 | GGTTCCACCAGCTCTACTGCAGAATC | 386 |
| N_H04.ab1 | STAESPGPGTSTPESG | | TCCTGGCCCAGGTTCTACTAGCTCTA | |
| | SASP | | CCGCAGAATCTCCTGGTCCAGGTACC | |
| | | | TCTACTCCTGAAAGCGGTTCCGCATC | |
| | | | TCCA | |
| LCW0403_051_GFP- | GSTSSTAESPGPGSTS | 387 | GGTTCTACTAGCTCTACTGCTGAATC | 388 |
| N_A05.ab1 | STAESPGPGSTSESPS | | TCCGGGCCCAGGTTCTACTAGCTCTA | |
| | GTAP | | CCGCTGAATCTCCGGGTCCAGGTTCT | |
| | | | ACTAGCGAATCTCCTTCTGGTACCGC | |
| | | | TCCA | |
| LCW0403_053_GFP- | GTSPSGESSTAPGSTS | 389 | GGTACCTCCCCGAGCGGTGAATCTTC | 390 |
| N_B05.ab1 | ESPSGTAPGSTSSTAE | | TACTGCACCAGGTTCTACTAGCGAAT | |
| | SPGP | | CCCCTTCTGGTACTGCTCCAGGTTCC | |
| | | | ACCAGCTCTACTGCAGAATCTCCGGG | |
| | | | TCCA | |
| LCW0403_054_GFP- | GSTSESPSGTAPGTSP | 391 | GGTTCTACTAGCGAATCCCCGTCTGG | 392 |
| N_C05.ab1 | SGESSTAPGSTSSTAE | | TACTGCTCCAGGTACTTCCCCTAGCG | |
| | SPGP | | GTGAATCTTCTACTGCTCCAGGTTCT | |
| | | | ACCAGCTCTACCGCAGAATCTCCGGG | |
| | | | TCCA | |
| LCW0403_057_GFP- | GSTSSTAESPGPGSTS | 393 | GGTTCTACCAGCTCTACCGCTGAATC | 394 |
| N_D05.ab1 | ESPSGTAPGTSPSGES | | TCCTGGCCCAGGTTCTACTAGCGAAT | |
| | STAP | | CTCCGTCTGGCACCGCACCAGGTACT | |
| | | | TCCCCTAGCGGTGAATCTTCTACTGC | |
| | | | ACCA | |
| LCW0403_058_GFP- | GSTSESPSGTAPGSTS | 395 | GGTTCTACTAGCGAATCTCCTTCTGG | 396 |
| N_E05.ab1 | ESPSGTAPGTSTPESG | | CACTGCACCAGGTTCTACCAGCGAAT | |
| | SASP | | CTCCGTCTGGCACTGCACCAGGTACC | |
| | | | TCTACCCCTGAAAGCGGTTCCGCTTC | |
| | | | TCCA | |
| LCW0403_060_GFP- | GTSTPESGSASPGSTS | 397 | GGTACCTCTACTCCGGAAAGCGGTTC | 398 |
| N_F05.ab1 | ESPSGTAPGSTSSTAE | | CGCATCTCCAGGTTCTACCAGCGAAT | |
| | SPGP | | CCCCGTCTGGCACCGCACCAGGTTCT | |
| | | | ACTAGCTCTACTGCTGAATCTCCGGG | |
| | | | CCCA | |
| LCW0403_063_GFP- | GSTSSTAESPGPGTSP | 399 | GGTTCTACTAGCTCTACTGCAGAATC | 400 |
| N_G05.ab1 | SGESSTAPGTSPSGES | | TCCGGGCCCAGGTACCTCTCCTAGCG | |
| | STAP | | GTGAATCTTCTACCGCTCCAGGTACT | |
| | | | TCTCCGAGCGGTGAATCTTCTACCGC | |
| | | | TCCA | |
| LCW0403_064_GFP- | GTSPSGESSTAPGTSP | 401 | GGTACCTCCCCTAGCGGCGAATCTTC | 402 |
| N_H05.ab1 | SGESSTAPGTSPSGES | | TACTGCTCCAGGTACCTCTCCTAGCG | |
| | STAP | | GCGAATCTTCTACCGCTCCAGGTACC | |
| | | | TCCCCTAGCGGTGAATCTTCTACCGC | |
| | | | ACCA | |
| LCW0403_065_GFP- | GSTSSTAESPGPGTST | 403 | GGTTCCACTAGCTCTACTGCTGAATC | 404 |
| N_A06.ab1 | PESGSASPGSTSESPS | | TCCTGGCCCAGGTACTTCTACTCCGG | |
| | GTAP | | AAAGCGGTTCCGCTTCTCCAGGTTCT | |
| | | | ACTAGCGAATCTCCGTCTGGCACCGC | |
| | | | ACCA | |
| LCW0403_066_GFP- | GSTSESPSGTAPGTSP | 405 | GGTTCTACTAGCGAATCTCCGTCTGG | 406 |
| N_B06.ab1 | SGESSTAPGTSPSGES | | CACTGCTCCAGGTACTTCTCCTAGCG | |
| | STAP | | GTGAATCTTCTACCGCTCCAGGTACT | |
| | | | TCCCCTAGCGGCGAATCTTCTACCGC | |
| | | | TCCA | |
| LCW0403_067_GFP- | GSTSESPSGTAPGTST | 407 | GGTTCTACTAGCGAATCTCCTTCTGG | 408 |
| N_C06.ab1 | PESGSASPGSTSSTAE | | TACCGCTCCAGGTACTTCTACCCCTG | |
| | SPGP | | AAAGCGGCTCCGCTTCTCCAGGTTCC | |
| | | | ACTAGCTCTACCGCTGAATCTCCGGG | |
| | | | TCCA | |
| LCW0403_068_GFP- | GSTSSTAESPGPGSTS | 409 | GGTTCCACTAGCTCTACTGCTGAATC | 410 |
| N_D06.ab1 | STAESPGPGSTSESPS | | TCCTGGCCCAGGTTCTACCAGCTCTA | |
| | GTAP | | CCGCTGAATCTCCTGGCCCAGGTTCT | |
| | | | ACCAGCGAATCTCCGTCTGGCACCGC | |
| | | | ACCA | |
| LCW0403_069_GFP- | GSTSESPSGTAPGTST | 411 | GGTTCTACTAGCGAATCCCCGTCTGG | 412 |
| N_E06.ab1 | PESGSASPGTSTPESG | | TACCGCACCAGGTACTTCTACCCCGG | |
| | SASP | | AAAGCGGCTCTGCTTCTCCAGGTACT | |
| | | | TCTACCCCGGAAAGCGGCTCCGCATC | |
| | | | TCCA | |
| LCW0403_070_GFP- | GSTSESPSGTAPGTST | 413 | GGTTCTACTAGCGAATCCCCGTCTGG | 414 |
| N_F06.ab1 | PESGSASPGTSTPESG | | TACTGCTCCAGGTACTTCTACTCCTG | |
| | SASP | | AAAGCGGTTCCGCTTCTCCAGGTACC | |
| | | | TCTACTCCGGAAAGCGGTTCTGCATC | |
| | | | TCCA | |

### Example 4

### Construction of XTEN_AG36 Segments

[0319] A codon library encoding sequences of 36 amino acid length was constructed. The sequences were designated XTEN_AG36. Its segments have the amino acid sequence [X]₃ where X is a 12mer peptide with the sequence: GTPGSGTASSSP (SEQ ID NO: 415), GSSTPSGATGSP (SEQ ID NO: 416), GSSPSASTGTGP (SEQ ID NO: 417), or GASPGTSSTGSP (SEQ ID NO: 418). The insert was obtained by annealing the following pairs of phosphorylated synthetic oligonucleotide pairs:

AG1for:

(SEQ ID NO: 419)

AGGTACYCCKGGYAGCGGTACYGCWTCTTCYTCTCC
AG1rev:

(SEQ ID NO: 420)

ACCTGGAGARGAAGAWGCRGTACCGCTRCCMGGRGT
AG2for:

(SEQ ID NO: 421)

AGGTAGCTCTACYCCKTCTGGTGCWACYGGYTCYCC
AG2rev:

(SEQ ID NO: 422)

ACCTGGRGARCCRGTWGCACCAGAMGGRGTAGAGCT
AG3for:

(SEQ ID NO: 423)

AGGTTCTAGCCCKTCTGCWTCYACYGGTACYGGYCC
AG3rev:

(SEQ ID NO: 424)

ACCTGGRCCRGTACCRGTRGAWGCAGAMGGGCTAGA
AG4for:

(SEQ ID NO: 425)

AGGTGCWTCYCCKGGYACYAGCTCTACYGGTTCTCC
AG4rev:

(SEQ ID NO: 426)

ACCTGGAGAACCRGTAGAGCTRGTRCCMGGRGAWGC

[0320] We also annealed the phosphorylated oligonucleotide 3KpnIstopperFor: AGGTTCGTCTTCACTCGAGGGTAC (SEQ ID NO: 427) and the non-phosphorylated oligonucleotide pr_3KpnIstopperRev: CCTCGAGTGAAGACGA (SEQ ID NO: 428). The annealed oligonucleotide pairs were ligated, which resulted in a mixture of products with varying length that represents the varying number of 12mer repeats ligated to one BbsI/KpnI segment. The products corresponding to the length of 36 amino acids were isolated from the mixture by preparative agarose gel electrophoresis and ligated into the BsaI/KpnI digested stuffer vector pCW0359. Most of the clones in the resulting library designated LCW0404 showed green fluorescence after induction which shows that the sequence of XTEN_AG36 had been ligated in frame with the GFP gene and most sequences of XTEN_AG36 show good expression.

[0321] We screened 96 isolates from library LCW0404 for high level of fluorescence by stamping them onto agar plate containing IPTG. The same isolates were evaluated by PCR and 48 isolates were identified that contained segments with 36 amino acids as well as strong fluorescence. These isolates were sequenced and 44 clones were identified that contained correct XTEN_AG36 segments. The file names of the nucleotide and amino acid constructs for these segments are listed in Table 11.

TABLE 11
DNA and Amino Acid Sequences for 36-mer motifs

| | | SEQ ID | | SEQ ID |
|---|---|---|---|---|
| File name | Amino acid sequence | NO: | Nucleotide sequence | NO: |
| LCW0404_001_GFP- | GASPGTSSTGSPGTPG | 429 | GGTGCATCCCCGGGCACTAGCTCTAC | 430 |
| N_A07.ab1 | SGTASSSPGSSTPSGA | | CGGTTCTCCAGGTACTCCTGGTAGCG | |
| | TGSP | | GTACTGCTTCTTCTTCTCCAGGTAGCT | |
| | | | CTACTCCTTCTGGTGCTACTGGTTCTC | |
| | | | CA | |
| LCW0404_003_GFP- | GSSTPSGATGSPGSSP | 431 | GGTAGCTCTACCCCTTCTGGTGCTACC | 432 |
| N_B07.ab1 | SASTGTGPGSSTPSGA | | GGCTCTCCAGGTTCTAGCCCGTCTGCT | |
| | TGSP | | TCTACCGGTACCGGTCCAGGTAGCTCT | |
| | | | ACCCCTTCTGGTGCTACTGGTTCTCCA | |
| LCW0404_006_GFP- | GASPGTSSTGSPGSSP | 433 | GGTGCATCTCCGGGTACTAGCTCTACC | 434 |
| N_C07.ab1 | SASTGTGPGSSTPSGA | | GGTTCTCCAGGTTCTAGCCCTTCTGCT | |
| | TGSP | | TCCACTGGTACCGGCCCAGGTAGCTC | |
| | | | TACCCCGTCTGGTGCTACTGGTTCCCCA | |
| LCW0404_007_GFP- | GTPGSGTASSSPGSST | 435 | GGTACTCCGGGCAGCGGTACTGCTTC | 436 |
| N_D07.ab1 | PSGATGSPGASPGTSS | | TTCCTCTCCAGGTAGCTCTACCCCTTC | |
| | TGSP | | TGGTGCAACTGGTTCCCCAGGTGCAT | |
| | | | CCCCTGGTACTAGCTCTACCGGTTCTC | |
| | | | CA | |
| LCW0404_009_GFP- | GTPGSGTASSSPGASP | 437 | GGTACCCCTGGCAGCGGTACTGCTTCT | 438 |
| N_E07.ab1 | GTSSTGSPGSRPSAST | | TCTTCTCCAGGTGCTTCCCCTGGTACC | |
| | GTGP | | AGCTCTACCGGTTCTCCAGGTTCTAGA | |
| | | | CCTTCTGCATCCACCGGTACTGGTCCA | |
| LCW0404_011_GFP- | GASPGTSSTGSPGSST | 439 | GGTGCATCTCCTGGTACCAGCTCTACC | 440 |
| N_F07.ab1 | PSGATGSPGASPGTSS | | GGTTCTCCAGGTAGCTCTACTCCTTCT | |
| | TGSP | | GGTGCTACTGGCTCTCCAGGTGCTTCC | |
| | | | CCGGGTACCAGCTCTACCGGTTCTCCA | |
| LCW0404_012_GFP- | GTPGSGTASSSPGSST | 441 | GGTACCCCGGGCAGCGGTACCGCATC | 442 |
| N_G07.ab1 | PSGATGSPGSSTPSGA | | TTCCTCTCCAGGTAGCTCTACCCCGTC | |
| | TGSP | | TGGTGCTACCGGTTCCCCAGGTAGCTC | |
| | | | TACCCCGTCTGGTGCAACCGGCTCCCCA | |
| LCW0404_014_GFP- | GASPGTSSTGSPGASP | 443 | GGTGCATCTCCGGGCACTAGCTCTACT | 444 |
| N_H07.ab1 | GTSSTGSPGASPGTSS | | GGTTCTCCAGGTGCATCCCCTGGCACT | |
| | TGSP | | AGCTCTACTGGTTCTCCAGGTGCTTCT | |
| | | | CCTGGTACCAGCTCTACTGGTTCTCCA | |
| LCW0404_015_GFP- | GSSTPSGATGSPGSSP | 445 | GGTAGCTCTACTCCGTCTGGTGCAACC | 446 |
| N_A08.ab1 | SASTGTGPGASPGTSS | | GGCTCCCCAGGTTCTAGCCCGTCTGCT | |
| | TGSP | | TCCACTGGTACTGGCCCAGGTGCTTCC | |
| | | | CCGGGCACCAGCTCTACTGGTTCTCCA | |
| LCW0404_016_GFP- | GSSTPSGATGSPGSST | 447 | GGTAGCTCTACTCCTTCTGGTGCTACC | 448 |
| N_B08.ab1 | PSGATGSPGTPGSGT | | GGTTCCCCAGGTAGCTCTACTCCTTCT | |
| | ASSSP | | GGTGCTACTGGTTCCCCAGGTACTCCG | |
| | | | GGCAGCGGTACTGCTTCTTCCTCTCCA | |
| LCW0404_017_GFP- | GSSTPSGATGSPGSST | 449 | GGTAGCTCTACTCCGTCTGGTGCAACC | 450 |
| N_C08.ab1 | PSGATGSPGASPGTSS | | GGTTCCCCAGGTAGCTCTACTCCTTCT | |
| | TGSP | | GGTGCTACTGGCTCCCCAGGTGCATC | |
| | | | CCCTGGCACCAGCTCTACCGGTTCTCCA | |
| LCW0404_018_GFP- | GTPGSGTASSSPGSSP | 451 | GGTACTCCTGGTAGCGGTACCGCATC | 452 |
| N_D08.ab1 | SASTGTGPGSSTPSGA | | TTCCTCTCCAGGTTCTAGCCCTTCTGC | |
| | TGSP | | ATCTACCGGTACCGGTCCAGGTAGCT | |
| | | | CTACTCCTTCTGGTGCTACTGGCTCTC | |
| | | | CA | |
| LCW0404_023_GFP- | GASPGTSSTGSPGSSP | 453 | GGTGCTTCCCCGGGCACTAGCTCTACC | 454 |
| N_F08.ab1 | SASTGTGPGTPGSGT | | GGTTCTCCAGGTTCTAGCCCTTCTGCA | |
| | ASSSP | | TCTACTGGTACTGGCCCAGGTACTCCG | |
| | | | GGCAGCGGTACTGCTTCTTCCTCTCCA | |
| LCW0404_025_GFP- | GSSTPSGATGSPGSST | 455 | GGTAGCTCTACTCCGTCTGGTGCTACC | 456 |
| N_G08.ab1 | PSGATGSPGASPGTSS | | GGCTCTCCAGGTAGCTCTACCCCTTCT | |
| | TGSP | | GGTGCAACCGGCTCCCCAGGTGCTTC | |
| | | | TCCGGGTACCAGCTCTACTGGTTCTCCA | |
| LCW0404_029_GFP- | GTPGSGTASSSPGSST | 457 | GGTACCCCTGGCAGCGGTACCGCTTC | 458 |
| N_A09.ab1 | PSGATGSPGSSPSAST | | TTCCTCTCCAGGTAGCTCTACCCCGTC | |
| | GTGP | | TGGTGCTACTGGCTCTCCAGGTTCTAG | |
| | | | CCCGTCTGCATCTACCGGTACCGGCCCA | |
| LCW0404_030_GFP- | GSSTPSGATGSPGTPG | 459 | GGTAGCTCTACTCCTTCTGGTGCAACC | 460 |
| N_B09.ab1 | SGTASSSPGTPGSGTA | | GGCTCCCCAGGTACCCCGGGCAGCGG | |
| | SSSP | | TACCGCATCTTCCTCTCCAGGTACTCC | |
| | | | GGGTAGCGGTACTGCTTCTTCTTCTCCA | |
| LCW0404_031_GFP- | GTPGSGTASSSPGSST | 461 | GGTACCCCGGGTAGCGGTACTGCTTC | 462 |
| N_C09.ab1 | PSGATGSPGASPGTSS | | TTCCTCTCCAGGTAGCTCTACCCCTTC | |
| | TGSP | | TGGTGCAACCGGCTCTCCAGGTGCTTC | |
| | | | TCCGGGCACCAGCTCTACCGGTTCTCCA | |
| LCW0404_034_GFP- | GSSTPSGATGSPGSST | 463 | GGTAGCTCTACCCCGTCTGGTGCTACC | 464 |
| N_D09.ab1 | PSGATGSPGASPGTSS | | GGCTCTCCAGGTAGCTCTACCCCGTCT | |
| | TGSP | | GGTGCAACCGGCTCCCCAGGTGCATC | |
| | | | CCCGGGTACTAGCTCTACCGGTTCTCCA | |
| LCW0404_035_GFP- | GASPGTSSTGSPGTPG | 465 | GGTGCTTCTCCGGGCACCAGCTCTACT | 466 |
| N_E09.ab1 | SGTASSSPGSSTPSGA | | GGTTCTCCAGGTACCCCGGGCAGCGG | |
| | TGSP | | TACCGCATCTTCTTCTCCAGGTAGCTC | |
| | | | TACTCCTTCTGGTGCAACTGGTTCTCCA | |
| LCW0404_036_GFP- | GSSPSASTGTGPGSST | 467 | GGTTCTAGCCCGTCTGCTTCCACCGGT | 468 |
| N_F09.ab1 | PSGATGSPGTPGSGT | | ACTGGCCCAGGTAGCTCTACCCCGTCT | |
| | ASSSP | | GGTGCAACTGGTTCCCCAGGTACCCC | |
| | | | TGGTAGCGGTACCGCTTCTTCTTCTCCA | |
| LCW0404_037_GFP- | GASPGTSSTGSPGSSP | 469 | GGTGCTTCTCCGGGCACCAGCTCTACT | 470 |
| N_G09.ab1 | SASTGTGPGSSTPSGA | | GGTTCTCCAGGTTCTAGCCCTTCTGCA | |
| | TGSP | | TCCACCGGTACCGGTCCAGGTAGCTC | |
| | | | TACCCCTTCTGGTGCAACCGGCTCTCCA | |
| LCW0404_040_GFP- | GASPGTSSTGSPGSST | 471 | GGTGCATCCCCGGGCACCAGCTCTAC | 472 |
| N_H09.ab1 | PSGATGSPGSSTPSGA | | CGGTTCTCCAGGTAGCTCTACCCCGTC | |
| | TGSP | | TGGTGCTACCGGCTCTCCAGGTAGCTC | |
| | | | TACCCCGTCTGGTGCTACTGGCTCTCCA | |
| LCW0404_041_GFP- | GTPGSGTASSSPGSST | 473 | GGTACCCCTGGTAGCGGTACTGCTTCT | 474 |
| N_A10.ab1 | PSGATGSPGTPGSGT | | TCCTCTCCAGGTAGCTCTACTCCGTCT | |
| | ASSSP | | GGTGCTACCGGTTCTCCAGGTACCCC | |
| | | | GGGTAGCGGTACCGCATCTTCTTCTCCA | |
| LCW0404_043_GFP- | GSSPSASTGTGPGSST | 475 | GGTTCTAGCCCTTCTGCTTCCACCGGT | 476 |
| N_C10.ab1 | PSGATGSPGSSTPSGA | | ACTGGCCCAGGTAGCTCTACCCCTTCT | |
| | TGSP | | GGTGCTACCGGCTCCCCAGGTAGCTC | |
| | | | TACTCCTTCTGGTGCAACTGGCTCTCCA | |
| LCW0404_045_GFP- | GASPGTSSTGSPGSSP | 477 | GGTGCTTCTCCTGGCACCAGCTCTACT | 478 |
| N_D10.ab1 | SASTGTGPGSSPSAST | | GGTTCTCCAGGTTCTAGCCCTTCTGCT | |
| | GTGP | | TCTACCGGTACTGGTCCAGGTTCTAGC | |
| | | | CCTTCTGCATCCACTGGTACTGGTCCA | |
| LCW0404_047_GFP- | GTPGSGTASSSPGASP | 479 | GGTACTCCTGGCAGCGGTACCGCTTCT | 480 |
| N_F10.ab1 | GTSSTGSPGASPGTSS | | TCTTCTCCAGGTGCTTCTCCTGGTACT | |
| | TGSP | | AGCTCTACTGGTTCTCCAGGTGCTTCT | |
| | | | CCGGGCACTAGCTCTACTGGTTCTCCA | |
| LCW0404_048_GFP- | GSSTPSGATGSPGASP | 481 | GGTAGCTCTACCCCGTCTGGTGCTACC | 482 |
| N_G10.ab1 | GTSSTGSPGSSTPSGA | | GGTTCCCCAGGTGCTTCTCCTGGTACT | |
| | TGSP | | AGCTCTACCGGTTCTCCAGGTAGCTCT | |
| | | | ACCCCGTCTGGTGCTACTGGCTCTCCA | |
| LCW0404_049_GFP- | GSSTPSGATGSPGTPG | 483 | GGTAGCTCTACCCCGTCTGGTGCTACT | 484 |
| N_H10.ab1 | SGTASSSPGSSTPSGA | | GGTTCTCCAGGTACTCCGGGCAGCGG | |
| | TGSP | | TACTGCTTCTTCCTCTCCAGGTAGCTC | |
| | | | TACCCCTTCTGGTGCTACTGGCTCTCCA | |
| LCW0404_050_GFP- | GASPGTSSTGSPGSSP | 485 | GGTGCATCTCCTGGTACCAGCTCTACT | 486 |
| N_A11.ab1 | SASTGTGPGSSTPSGA | | GGTTCTCCAGGTTCTAGCCCTTCTGCT | |
| | TGSP | | TCTACCGGTACCGGTCCAGGTAGCTCT | |
| | | | ACTCCTTCTGGTGCTACCGGTTCTCCA | |
| LCW0404_051_GFP- | GSSTPSGATGSPGSST | 487 | GGTAGCTCTACCCCGTCTGGTGCTACT | 488 |
| N_B11.ab1 | PSGATGSPGSSTPSGA | | GGCTCTCCAGGTAGCTCTACTCCTTCT | |
| | TGSP | | GGTGCTACTGGTTCCCCAGGTAGCTCT | |
| | | | ACCCCGTCTGGTGCAACTGGCTCTCCA | |
| LCW0404_052_GFP- | GASPGTSSTGSPGTPG | 489 | GGTGCATCCCCGGGTACCAGCTCTAC | 490 |
| N_C11.ab1 | SGTASSSPGASPGTSS | | CGGTTCTCCAGGTACTCCTGGCAGCG | |
| | TGSP | | GTACTGCATCTTCCTCTCCAGGTGCTT | |
| | | | CTCCGGGCACCAGCTCTACTGGTTCTC | |
| | | | CA | |
| LCW0404_053_GFP- | GSSTPSGATGSPGSSP | 491 | GGTAGCTCTACTCCTTCTGGTGCAACT | 492 |
| N_D11.ab1 | SASTGTGPGASPGTSS | | GGTTCTCCAGGTTCTAGCCCGTCTGCA | |
| | TGSP | | TCCACTGGTACCGGTCCAGGTGCTTCC | |
| | | | CCTGGCACCAGCTCTACCGGTTCTCCA | |
| LCW0404_057_GFP- | GASPGTSSTGSPGSST | 493 | GGTGCATCTCCTGGTACTAGCTCTACT | 494 |
| N_E11.ab1 | PSGATGSPGSSPSAST | | GGTTCTCCAGGTAGCTCTACTCCGTCT | |
| | GTGP | | GGTGCAACCGGCTCTCCAGGTTCTAG | |
| | | | CCCTTCTGCATCTACCGGTACTGGTCCA | |
| LCW0404_060_GFP- | GTPGSGTASSSPGSST | 495 | GGTACTCCTGGCAGCGGTACCGCATC | 496 |
| N_F11.ab1 | PSGATGSPGASPGTSS | | TTCCTCTCCAGGTAGCTCTACTCCGTC | |
| | TGSP | | TGGTGCAACTGGTTCCCCAGGTGCTTC | |
| | | | TCCGGGTACCAGCTCTACCGGTTCTCCA | |
| LCW0404_062_GFP- | GSSTPSGATGSPGTPG | 497 | GGTAGCTCTACCCCGTCTGGTGCAAC | 498 |
| N_G11.ab1 | SGTASSSPGSSTPSGA | | CGGCTCCCCAGGTACTCCTGGTAGCG | |
| | TGSP | | GTACCGCTTCTTCTTCTCCAGGTAGCT | |
| | | | CTACTCCGTCTGGTGCTACCGGCTCCC | |
| | | | CA | |
| LCW0404_066_GFP- | GSSPSASTGTGPGSSP | 499 | GGTTCTAGCCCTTCTGCATCCACCGGT | 500 |
| N_H11.ab1 | SASTGTGPGASPGTSS | | ACCGGCCCAGGTTCTAGCCCGTCTGCT | |
| | TGSP | | TCTACCGGTACTGGTCCAGGTGCTTCT | |
| | | | CCGGGTACTAGCTCTACTGGTTCTCCA | |
| LCW0404_067_GFP- | GTPGSGTASSSPGSST | 501 | GGTACCCCGGGTAGCGGTACCGCTTC | 502 |
| N_A12.ab1 | PSGATGSPGSNPSAST | | TTCTTCTCCAGGTAGCTCTACTCCGTC | |
| | GTGP | | TGGTGCTACCGGCTCTCCAGGTTCTAA | |
| | | | CCCTTCTGCATCCACCGGTACCGGCCCA | |
| LCW0404_068_GFP- | GSSPSASTGTGPGSST | 503 | GGTTCTAGCCCTTCTGCATCTACTGGT | 504 |
| N_B12.ab1 | PSGATGSPGASPGTSS | | ACTGGCCCAGGTAGCTCTACTCCTTCT | |
| | TGSP | | GGTGCTACCGGCTCTCCAGGTGCTTCT | |
| | | | CCGGGTACTAGCTCTACCGGTTCTCCA | |
| LCW0404_069_GFP- | GSSTPSGATGSPGASP | 505 | GGTAGCTCTACCCCTTCTGGTGCAACC | 506 |
| N_C12.ab1 | GTSSTGSPGTPGSGTA | | GGCTCTCCAGGTGCATCCCCGGGTAC | |
| | SSSP | | CAGCTCTACCGGTTCTCCAGGTACTCC | |
| | | | GGGTAGCGGTACCGCTTCTTCCTCTCCA | |
| LCW0404_070_GFP- | GSSTPSGATGSPGSST | 507 | GGTAGCTCTACTCCGTCTGGTGCAACC | 508 |
| N_D12.ab1 | PSGATGSPGSSTPSGA | | GGTTCCCCAGGTAGCTCTACCCCTTCT | |
| | TGSP | | GGTGCAACCGGCTCCCCAGGTAGCTC | |
| | | | TACCCCTTCTGGTGCAACTGGCTCTCCA | |
| LCW0404_073_GFP- | GASPGTSSTGSPGTPG | 509 | GGTGCTTCTCCTGGCACTAGCTCTACC | 510 |
| N_E12.ab1 | SGTASSSPGSSTPSGA | | GGTTCTCCAGGTACCCCTGGTAGCGG | |
| | TGSP | | TACCGCATCTTCCTCTCCAGGTAGCTC | |
| | | | TACTCCTTCTGGTGCTACTGGTTCCCCA | |
| LCW0404_075_GFP- | GSSTPSGATGSPGSSP | 511 | GGTAGCTCTACCCCGTCTGGTGCTACT | 512 |
| N_F12.ab1 | SASTGTGPGSSPSAST | | GGCTCCCCAGGTTCTAGCCCTTCTGCA | |
| | GTGP | | TCCACCGGTACCGGTCCAGGTTCTAG | |
| | | | CCCGTCTGCATCTACTGGTACTGGTCCA | |
| LCW0404_080_GFP- | GASPGTSSTGSPGSSP | 513 | GGTGCTTCCCCGGGCACCAGCTCTACT | 514 |
| N_G12.ab1 | SASTGTGPGSSPSAST | | GGTTCTCCAGGTTCTAGCCCGTCTGCT | |
| | GTGP | | TCTACTGGTACTGGTCCAGGTTCTAGC | |
| | | | CCTTCTGCTTCCACTGGTACTGGTCCA | |
| LCW0404_081_GFP- | GASPGTSSTGSPGSSP | 515 | GGTGCTTCCCCGGGTACCAGCTCTACC | 516 |
| N_H12.ab1 | SASTGTGPGTPGSGT | | GGTTCTCCAGGTTCTAGCCCTTCTGCT | |
| | ASSSP | | TCTACCGGTACCGGTCCAGGTACCCCT | |
| | | | GGCAGCGGTACCGCATCTTCCTCTCCA | |

### Example 5

### Construction of XTEN_AE864

[0322] XTEN_AE864 was constructed from serial dimerization of XTEN_AE36 to AE72, 144, 288, 576 and 864. A collection of XTEN_AE72 segments was constructed from 37 different segments of XTEN_AE36. Cultures of E. coli harboring all 37 different 36-amino acid segments were mixed and plasmid was isolated. This plasmid pool was digested with BsaI/NcoI to generate the small fragment as the insert. The same plasmid pool was digested with BbsI/NcoI to generate the large fragment as the vector. The insert and vector fragments were ligated resulting in a doubling of the length and the ligation mixture was transformed into BL21Gold(DE3) cells to obtain colonies of XTEN_AE72.

[0323] This library of XTEN_AE72 segments was designated LCW0406. All clones from LCW0406 were combined and dimerized again using the same process as described above yielding library LCW0410 of XTEN_AE144. All clones from LCW0410 were combined and dimerized again using the same process as described above yielding library LCW0414 of XTEN_AE288. Two isolates LCW0414.001 and LCW0414.002 were randomly picked from the library and sequenced to verify the identities. All clones from LCW0414 were combined and dimerized again using the same process as described above yielding library LCW0418 of XTEN_AE576. We screened 96 isolates from library LCW0418 for high level of GFP fluorescence. 8 isolates with right sizes of inserts by PCR and strong fluorescence were sequenced and 2 isolates (LCW0418.018 and LCW0418.052) were chosen for future use based on sequencing and expression data.

[0324] The specific clone pCW0432 of XTEN_AE864 was constructed by combining LCW0418.018 of XTEN_AE576 and LCW0414.002 of XTEN_AE288 using the same dimerization process as described above.

### Example 6

### Construction of XTEN_AM144

[0325] A collection of XTEN_AM144 segments was constructed starting from 37 different segments of XTEN_AE36, 44 segments of XTEN_AF36, and 44 segments of XTEN_AG36.

[0326] Cultures of E. coli harboring all 125 different 36-amino acid segments were mixed and plasmid was isolated. This plasmid pool was digested with BsaI/NcoI to generate the small fragment as the insert. The same plasmid pool was digested with BbsI/NcoI to generate the large fragment as the vector. The insert and vector fragments were ligated resulting in a doubling of the length and the ligation mixture was transformed into BL21Gold(DE3) cells to obtain colonies of XTEN_AM72.

[0327] This library of XTEN_AM72 segments was designated LCW0461. All clones from LCW0461 were combined and dimerized again using the same process as described above yielding library LCW0462. 1512 Isolates from library LCW0462 were screened for protein expression. Individual colonies were transferred into 96 well plates and cultured overnight as starter cultures. These starter cultures were diluted into fresh autoinduction medium and cultured for 20-30 h. Expression was measured using a fluorescence plate reader with excitation at 395 nm and emission at 510 nm. 192 isolates showed high level expression and were submitted to DNA sequencing. Most clones in library LCW0462 showed good expression and similar physicochemical properties suggesting that most combinations of XTEN_AM36 segments yield useful XTEN sequences. 30 isolates from LCW0462 were chosen as a preferred collection of XTEN_AM144 segments for the construction of multifunctional proteins that contain multiple XTEN segments. The file names of the nucleotide and amino acid constructs for these segments are listed in Table 12.

TABLE 12
DNA and amino acid sequences for AM144 segments

| | | SEQ ID | | SEQ ID |
|---|---|---|---|---|
| Clone | Sequence Trimmed | NO: | Protein Sequence | NO: |
| LCW462_r1 | GGTACCCCGGGCAGCGGTACCGC | 517 | GTPGSGTASSSPGSSTPS | 518 |
| | ATCTTCCTCTCCAGGTAGCTCTAC | | GATGSPGSSTPSGATGS | |
| | CCCGTCTGGTGCTACCGGTTCCC | | PGSPAGSPTSTEEGTSES | |
| | CAGGTAGCTCTACCCCGTCTGGT | | ATPESGPGTSTEPSEGS | |
| | GCAACCGGCTCCCCAGGTAGCCC | | APGSSPSASTGTGPGSS | |
| | GGCTGGCTCTCCTACCTCTACTG | | PSASTGTGPGASPGTSS | |
| | AGGAAGGTACTTCTGAAAGCGCT | | TGSPGTSTEPSEGSAPG | |
| | ACTCCTGAGTCTGGTCCAGGTAC | | TSTEPSEGSAPGSEPATS | |
| | CTCTACTGAACCGTCCGAAGGTA | | GSETP | |
| | GCGCTCCAGGTTCTAGCCCTTCT | | | |
| | GCATCCACCGGTACCGGCCCAGG | | | |
| | TTCTAGCCCGTCTGCTTCTACCGG | | | |
| | TACTGGTCCAGGTGCTTCTCCGG | | | |
| | GTACTAGCTCTACTGGTTCTCCA | | | |
| | GGTACCTCTACCGAACCGTCCGA | | | |
| | GGGTAGCGCACCAGGTACCTCTA | | | |
| | CTGAACCGTCTGAGGGTAGCGCT | | | |
| | CCAGGTAGCGAACCGGCAACCTC | | | |
| | CGGTTCTGAAACTCCA | | | |
| LCW462_r5 | GGTTCTACCAGCGAATCCCCTTC | 519 | GSTSESPSGTAPGSTSES | 520 |
| | TGGCACTGCACCAGGTTCTACTA | | PSGTAPGTSPSGESSTAP | |
| | GCGAATCCCCTTCTGGTACCGCA | | GTSTEPSEGSAPGTSTEP | |
| | CCAGGTACTTCTCCGAGCGGCGA | | SEGSAPGTSESATPESG | |
| | ATCTTCTACTGCTCCAGGTACCTC | | PGASPGTSSTGSPGSSTP | |
| | TACTGAACCTTCCGAAGGCAGCG | | SGATGSPGASPGTSSTG | |
| | CTCCAGGTACCTCTACCGAACCG | | SPGSTSESPSGTAPGSTS | |
| | TCCGAGGGCAGCGCACCAGGTAC | | ESPSGTAPGTSTPESGS | |
| | TTCTGAAAGCGCAACCCCTGAAT | | ASP | |
| | CCGGTCCAGGTGCATCTCCTGGT | | | |
| | ACCAGCTCTACCGGTTCTCCAGG | | | |
| | TAGCTCTACTCCTTCTGGTGCTAC | | | |
| | TGGCTCTCCAGGTGCTTCCCCGG | | | |
| | GTACCAGCTCTACCGGTTCTCCA | | | |
| | GGTTCTACTAGCGAATCTCCTTCT | | | |
| | GGCACTGCACCAGGTTCTACCAG | | | |
| | CGAATCTCCGTCTGGCACTGCAC | | | |
| | CAGGTACCTCTACCCCTGAAAGC | | | |
| | GGTTCCGCTTCTCCA | | | |
| LCW462_r9 | GGTACTTCTACCGAACCTTCCGA | 521 | GTSTEPSEGSAPGTSES | 522 |
| | GGGCAGCGCACCAGGTACTTCTG | | ATPESGPGTSESATPES | |
| | AAAGCGCTACCCCTGAGTCCGGC | | GPGTSTEPSEGSAPGTS | |
| | CCAGGTACTTCTGAAAGCGCTAC | | ESATPESGPGTSTEPSEG | |
| | TCCTGAATCCGGTCCAGGTACCT | | SAPGTSTEPSEGSAPGS | |
| | CTACTGAACCTTCTGAGGGCAGC | | EPATSGSETPGSPAGSP | |
| | GCTCCAGGTACTTCTGAAAGCGC | | TSTEEGASPGTSSTGSP | |
| | TACCCCGGAGTCCGGTCCAGGTA | | GSSPSASTGTGPGSSPS | |
| | CTTCTACTGAACCGTCCGAAGGT | | ASTGTGP | |
| | AGCGCACCAGGTACTTCTACTGA | | | |
| | ACCTTCCGAAGGTAGCGCTCCAG | | | |
| | GTAGCGAACCTGCTACTTCTGGT | | | |
| | TCTGAAACCCCAGGTAGCCCGGC | | | |
| | TGGCTCTCCGACCTCCACCGAGG | | | |
| | AAGGTGCTTCTCCTGGCACCAGC | | | |
| | TCTACTGGTTCTCCAGGTTCTAGC | | | |
| | CCTTCTGCTTCTACCGGTACTGGT | | | |
| | CCAGGTTCTAGCCCTTCTGCATCC | | | |
| | ACTGGTACTGGTCCA | | | |
| LCW462_r10 | GGTAGCGAACCGGCAACCTCTGG | 523 | GSEPATSGSETPGTSES | 524 |
| | CTCTGAAACCCCAGGTACCTCTG | | ATPESGPGTSESATPES | |
| | AAAGCGCTACTCCGGAATCTGGT | | GPGSTSESPSGTAPGSTS | |
| | CCAGGTACTTCTGAAAGCGCTAC | | ESPSGTAPGTSPSGESST | |
| | TCCGGAATCCGGTCCAGGTTCTA | | APGASPGTSSTGSPGSS | |
| | CCAGCGAATCTCCTTCTGGCACC | | PSASTGTGPGSSTPSGA | |
| | GCTCCAGGTTCTACTAGCGAATC | | TGSPGSSTPSGATGSPG | |
| | CCCGTCTGGTACCGCACCAGGTA | | SSTPSGATGSPGASPGT | |
| | CTTCTCCTAGCGGCGAATCTTCTA | | SSTGSP | |
| | CCGCACCAGGTGCATCTCCGGGT | | | |
| | ACTAGCTCTACCGGTTCTCCAGG | | | |
| | TTCTAGCCCTTCTGCTTCCACTGG | | | |
| | TACCGGCCCAGGTAGCTCTACCC | | | |
| | CGTCTGGTGCTACTGGTTCCCCA | | | |
| | GGTAGCTCTACTCCGTCTGGTGC | | | |
| | AACCGGTTCCCCAGGTAGCTCTA | | | |
| | CTCCTTCTGGTGCTACTGGCTCCC | | | |
| | CAGGTGCATCCCCTGGCACCAGC | | | |
| | TCTACCGGTTCTCCA | | | |
| LCW462_r15 | GGTGCTTCTCCGGGCACCAGCTC | 525 | GASPGTSSTGSPGSSPS | 526 |
| | TACTGGTTCTCCAGGTTCTAGCCC | | ASTGTGPGSSTPSGATG | |
| | TTCTGCATCCACCGGTACCGGTC | | SPGTSESATPESGPGSEP | |
| | CAGGTAGCTCTACCCCTTCTGGT | | ATSGSETPGSEPATSGS | |
| | GCAACCGGCTCTCCAGGTACTTC | | ETPGTSESATPESGPGTS | |
| | TGAAAGCGCTACCCCGGAATCTG | | TEPSEGSAPGTSTEPSEG | |
| | GCCCAGGTAGCGAACCGGCTACT | | SAPGTSTEPSEGSAPGT | |
| | TCTGGTTCTGAAACCCCAGGTAG | | STEPSEGSAPGSEPATS | |
| | CGAACCGGCTACCTCCGGTTCTG | | GSETP | |
| | AAACTCCAGGTACTTCTGAAAGC | | | |
| | GCTACTCCGGAGTCCGGTCCAGG | | | |
| | TACCTCTACCGAACCGTCCGAAG | | | |
| | GCAGCGCTCCAGGTACTTCTACT | | | |
| | GAACCTTCTGAGGGTAGCGCTCC | | | |
| | AGGTACCTCTACCGAACCGTCCG | | | |
| | AGGGTAGCGCACCAGGTACCTCT | | | |
| | ACTGAACCGTCTGAGGGTAGCGC | | | |
| | TCCAGGTAGCGAACCGGCAACCT | | | |
| | CCGGTTCTGAAACTCCA | | | |
| LCW462_r16 | GGTACCTCTACCGAACCTTCCGA | 527 | GTSTEPSEGSAPGSPAG | 528 |
| | AGGTAGCGCTCCAGGTAGCCCGG | | SPTSTEEGTSTEPSEGSA | |
| | CAGGTTCTCCTACTTCCACTGAG | | PGTSESATPESGPGSEP | |
| | GAAGGTACTTCTACCGAACCTTC | | ATSGSETPGTSESATPES | |
| | TGAGGGTAGCGCACCAGGTACCT | | GPGSPAGSPTSTEEGTS | |
| | CTGAAAGCGCAACTCCTGAGTCT | | ESATPESGPGTSTEPSEG | |
| | GGCCCAGGTAGCGAACCTGCTAC | | SAPGSEPATSGSETPGT | |
| | CTCCGGCTCTGAGACTCCAGGTA | | STEPSEGSAPGSEPATS | |
| | CCTCTGAAAGCGCAACCCCGGAA | | GSETP | |
| | TCTGGTCCAGGTAGCCCGGCTGG | | | |
| | CTCTCCTACCTCTACTGAGGAAG | | | |
| | GTACTTCTGAAAGCGCTACTCCT | | | |
| | GAGTCTGGTCCAGGTACCTCTAC | | | |
| | TGAACCGTCCGAAGGTAGCGCTC | | | |
| | CAGGTAGCGAACCTGCTACTTCT | | | |
| | GGTTCTGAAACTCCAGGTACTTC | | | |
| | TACCGAACCGTCCGAGGGTAGCG | | | |
| | CTCCAGGTAGCGAACCTGCTACT | | | |
| | TCTGGTTCTGAAACTCCA | | | |
| LCW462_r20 | GGTACTTCTACCGAACCGTCCGA | 529 | GTSTEPSEGSAPGTSTEP | 530 |
| | AGGCAGCGCTCCAGGTACCTCTA | | SEGSAPGTSTEPSEGSA | |
| | CTGAACCTTCCGAGGGCAGCGCT | | PGTSTEPSEGSAPGTSTE | |
| | CCAGGTACCTCTACCGAACCTTC | | PSEGSAPGTSTEPSEGS | |
| | TGAAGGTAGCGCACCAGGTACTT | | APGTSTEPSEGSAPGTS | |
| | CTACCGAACCGTCCGAAGGCAGC | | ESATPESGPGTSESATPE | |
| | GCTCCAGGTACCTCTACTGAACC | | SGPGTSTEPSEGSAPGS | |
| | TTCCGAGGGCAGCGCTCCAGGTA | | EPATSGSETPGSPAGSP | |
| | CCTCTACCGAACCTTCTGAAGGT | | TSTEE | |
| | AGCGCACCAGGTACTTCTACCGA | | | |
| | ACCTTCCGAGGGCAGCGCACCAG | | | |
| | GTACTTCTGAAAGCGCTACCCCT | | | |
| | GAGTCCGGCCCAGGTACTTCTGA | | | |
| | AAGCGCTACTCCTGAATCCGGTC | | | |
| | CAGGTACTTCTACTGAACCTTCC | | | |
| | GAAGGTAGCGCTCCAGGTAGCGA | | | |
| | ACCTGCTACTTCTGGTTCTGAAA | | | |
| | CCCCAGGTAGCCCGGCTGGCTCT | | | |
| | CCGACCTCCACCGAGGAA | | | |
| LCW462_r23 | GGTACTTCTACCGAACCGTCCGA | 531 | GTSTEPSEGSAPGTSTEP | 532 |
| | GGGCAGCGCTCCAGGTACTTCTA | | SEGSAPGTSTEPSEGSA | |
| | CTGAACCTTCTGAAGGCAGCGCT | | PGSTSESPSGTAPGSTSE | |
| | CCAGGTACTTCTACTGAACCTTC | | SPSGTAPGTSTPESGSAS | |
| | CGAAGGTAGCGCACCAGGTTCTA | | PGSEPATSGSETPGTSES | |
| | CCAGCGAATCCCCTTCTGGTACT | | ATPESGPGTSTEPSEGS | |
| | GCTCCAGGTTCTACCAGCGAATC | | APGTSTEPSEGSAPGTS | |
| | CCCTTCTGGCACCGCACCAGGTA | | ESATPESGPGTSESATPE | |
| | CTTCTACCCCTGAAAGCGGCTCC | | SGP | |
| | GCTTCTCCAGGTAGCGAACCTGC | | | |
| | AACCTCTGGCTCTGAAACCCCAG | | | |
| | GTACCTCTGAAAGCGCTACTCCT | | | |
| | GAATCTGGCCCAGGTACTTCTAC | | | |
| | TGAACCGTCCGAGGGCAGCGCAC | | | |
| | CAGGTACTTCTACTGAACCGTCT | | | |
| | GAAGGTAGCGCACCAGGTACTTC | | | |
| | TGAAAGCGCAACCCCGGAATCCG | | | |
| | GCCCAGGTACCTCTGAAAGCGCA | | | |
| | ACCCCGGAGTCCGGCCCA | | | |
| LCW462_r24 | GGTAGCTCTACCCCTTCTGGTGCT | 533 | GSSTPSGATGSPGSSPS | 534 |
| | ACCGGCTCTCCAGGTTCTAGCCC | | ASTGTGPGSSTPSGATG | |
| | GTCTGCTTCTACCGGTACCGGTC | | SPGSPAGSPTSTEEGSPA | |
| | CAGGTAGCTCTACCCCTTCTGGT | | GSPTSTEEGTSTEPSEGS | |
| | GCTACTGGTTCTCCAGGTAGCCC | | APGASPGTSSTGSPGSS | |
| | TGCTGGCTCTCCGACTTCTACTGA | | PSASTGTGPGTPGSGTA | |
| | GGAAGGTAGCCCGGCTGGTTCTC | | SSSPGSTSSTAESPGPGT | |
| | CGACTTCTACTGAGGAAGGTACT | | SPSGESSTAPGTSTPESG | |
| | TCTACCGAACCTTCCGAAGGTAG | | SASP | |
| | CGCTCCAGGTGCTTCCCCGGGCA | | | |
| | CTAGCTCTACCGGTTCTCCAGGTT | | | |
| | CTAGCCCTTCTGCATCTACTGGTA | | | |
| | CTGGCCCAGGTACTCCGGGCAGC | | | |
| | GGTACTGCTTCTTCCTCTCCAGGT | | | |
| | TCTACTAGCTCTACTGCTGAATCT | | | |
| | CCTGGCCCAGGTACTTCTCCTAG | | | |
| | CGGTGAATCTTCTACCGCTCCAG | | | |
| | GTACCTCTACTCCGGAAAGCGGT | | | |
| | TCTGCATCTCCA | | | |
| LCW462_r27 | GGTACCTCTACTGAACCTTCTGA | 535 | GTSTEPSEGSAPGTSES | 536 |
| | GGGCAGCGCTCCAGGTACTTCTG | | ATPESGPGTSTEPSEGS | |
| | AAAGCGCTACCCCGGAGTCCGGT | | APGTSTEPSEGSAPGTS | |
| | CCAGGTACTTCTACTGAACCGTC | | ESATPESGPGTSESATPE | |
| | CGAAGGTAGCGCACCAGGTACTT | | SGPGTPGSGTASSSPGA | |
| | CTACTGAACCGTCTGAAGGTAGC | | SPGTSSTGSPGASPGTSS | |
| | GCACCAGGTACTTCTGAAAGCGC | | TGSPGSPAGSPTSTEEG | |
| | AACCCCGGAATCCGGCCCAGGTA | | SPAGSPTSTEEGTSTEPS | |
| | CCTCTGAAAGCGCAACCCCGGAG | | EGSAP | |
| | TCCGGCCCAGGTACTCCTGGCAG | | | |
| | CGGTACCGCTTCTTCTTCTCCAGG | | | |
| | TGCTTCTCCTGGTACTAGCTCTAC | | | |
| | TGGTTCTCCAGGTGCTTCTCCGG | | | |
| | GCACTAGCTCTACTGGTTCTCCA | | | |
| | GGTAGCCCTGCTGGCTCTCCGAC | | | |
| | TTCTACTGAGGAAGGTAGCCCGG | | | |
| | CTGGTTCTCCGACTTCTACTGAG | | | |
| | GAAGGTACTTCTACCGAACCTTC | | | |
| | CGAAGGTAGCGCTCCA | | | |
| LCW462_r28 | GGTAGCCCAGCAGGCTCTCCGAC | 537 | GSPAGSPTSTEEGTSTEP | 538 |
| | TTCCACTGAGGAAGGTACTTCTA | | SEGSAPGTSTEPSEGSA | |
| | CTGAACCTTCCGAAGGCAGCGCA | | PGTSTEPSEGSAPGTSES | |
| | CCAGGTACCTCTACTGAACCTTC | | ATPESGPGTSESATPES | |
| | TGAGGGCAGCGCTCCAGGTACCT | | GPGTPGSGTASSSPGSS | |
| | CTACCGAACCGTCTGAAGGTAGC | | TPSGATGSPGASPGTSS | |
| | GCACCAGGTACCTCTGAAAGCGC | | TGSPGTSTEPSEGSAPG | |
| | AACTCCTGAGTCCGGTCCAGGTA | | TSESATPESGPGTSTEPS | |
| | CTTCTGAAAGCGCAACCCCGGAG | | EGSAP | |
| | TCTGGCCCAGGTACCCCGGGTAG | | | |
| | CGGTACTGCTTCTTCCTCTCCAGG | | | |
| | TAGCTCTACCCCTTCTGGTGCAA | | | |
| | CCGGCTCTCCAGGTGCTTCTCCG | | | |
| | GGCACCAGCTCTACCGGTTCTCC | | | |
| | AGGTACCTCTACTGAACCTTCTG | | | |
| | AGGGCAGCGCTCCAGGTACTTCT | | | |
| | GAAAGCGCTACCCCGGAGTCCGG | | | |
| | TCCAGGTACTTCTACTGAACCGT | | | |
| | CCGAAGGTAGCGCACCA | | | |
| LCW462_r38 | GGTAGCGAACCGGCAACCTCCGG | 539 | GSEPATSGSETPGTSES | 540 |
| | CTCTGAAACTCCAGGTACTTCTG | | ATPESGPGSEPATSGSE | |
| | AAAGCGCTACTCCGGAATCCGGC | | TPGSSTPSGATGSPGTP | |
| | CCAGGTAGCGAACCGGCTACTTC | | GSGTASSSPGSSTPSGA | |
| | CGGCTCTGAAACCCCAGGTAGCT | | TGSPGASPGTSSTGSPG | |
| | CTACCCCGTCTGGTGCAACCGGC | | SSTPSGATGSPGASPGT | |
| | TCCCCAGGTACTCCTGGTAGCGG | | SSTGSPGSEPATSGSETP | |
| | TACCGCTTCTTCTTCTCCAGGTAG | | GTSTEPSEGSAPGSEPA | |
| | CTCTACTCCGTCTGGTGCTACCG | | TSGSETP | |
| | GCTCCCCAGGTGCATCTCCTGGT | | | |
| | ACCAGCTCTACCGGTTCTCCAGG | | | |
| | TAGCTCTACTCCTTCTGGTGCTAC | | | |
| | TGGCTCTCCAGGTGCTTCCCCGG | | | |
| | GTACCAGCTCTACCGGTTCTCCA | | | |
| | GGTAGCGAACCTGCTACTTCTGG | | | |
| | TTCTGAAACTCCAGGTACTTCTA | | | |
| | CCGAACCGTCCGAGGGTAGCGCT | | | |
| | CCAGGTAGCGAACCTGCTACTTC | | | |
| | TGGTTCTGAAACTCCA | | | |
| LCW462_r39 | GGTACCTCTACTGAACCTTCCGA | 541 | GTSTEPSEGSAPGTSTEP | 542 |
| | AGGCAGCGCTCCAGGTACCTCTA | | SEGSAPGTSESATPESG | |
| | CCGAACCGTCCGAGGGCAGCGCA | | PGSPAGSPTSTEEGSPA | |
| | CCAGGTACTTCTGAAAGCGCAAC | | GSPTSTEEGTSTEPSEGS | |
| | CCCTGAATCCGGTCCAGGTAGCC | | APGSPAGSPTSTEEGTS | |
| | CTGCTGGCTCTCCGACTTCTACTG | | TEPSEGSAPGTSTEPSEG | |
| | AGGAAGGTAGCCCGGCTGGTTCT | | SAPGASPGTSSTGSPGS | |
| | CCGACTTCTACTGAGGAAGGTAC | | SPSASTGTGPGSSPSAST | |
| | TTCTACCGAACCTTCCGAAGGTA | | GTGP | |
| | GCGCTCCAGGTAGCCCGGCTGGT | | | |
| | TCTCCGACTTCCACCGAGGAAGG | | | |
| | TACCTCTACTGAACCTTCTGAGG | | | |
| | GTAGCGCTCCAGGTACCTCTACT | | | |
| | GAACCTTCCGAAGGCAGCGCTCC | | | |
| | AGGTGCTTCCCCGGGCACCAGCT | | | |
| | CTACTGGTTCTCCAGGTTCTAGCC | | | |
| | CGTCTGCTTCTACTGGTACTGGTC | | | |
| | CAGGTTCTAGCCCTTCTGCTTCCA | | | |
| | CTGGTACTGGTCCA | | | |
| LCW462_r41 | GGTAGCTCTACCCCGTCTGGTGC | 543 | GSSTPSGATGSPGASPG | 544 |
| | TACCGGTTCCCCAGGTGCTTCTCC | | TSSTGSPGSSTPSGATGS | |
| | TGGTACTAGCTCTACCGGTTCTCC | | PGSPAGSPTSTEEGTSES | |
| | AGGTAGCTCTACCCCGTCTGGTG | | ATPESGPGSEPATSGSE | |
| | CTACTGGCTCTCCAGGTAGCCCT | | TPGASPGTSSTGSPGSST | |
| | GCTGGCTCTCCAACCTCCACCGA | | PSGATGSPGSSPSASTG | |
| | AGAAGGTACCTCTGAAAGCGCAA | | TGPGSTSESPSGTAPGS | |
| | CCCCTGAATCCGGCCCAGGTAGC | | TSESPSGTAPGTSTPESG | |
| | GAACCGGCAACCTCCGGTTCTGA | | SASP | |
| | AACCCCAGGTGCATCTCCTGGTA | | | |
| | CTAGCTCTACTGGTTCTCCAGGT | | | |
| | AGCTCTACTCCGTCTGGTGCAAC | | | |
| | CGGCTCTCCAGGTTCTAGCCCTTC | | | |
| | TGCATCTACCGGTACTGGTCCAG | | | |
| | GTTCTACCAGCGAATCCCCTTCT | | | |
| | GGTACTGCTCCAGGTTCTACCAG | | | |
| | CGAATCCCCTTCTGGCACCGCAC | | | |
| | CAGGTACTTCTACCCCTGAAAGC | | | |
| | GGCTCCGCTTCTCCA | | | |
| LCW462_r42 | GGTTCTACCAGCGAATCTCCTTCT | 545 | GSTSESPSGTAPGSTSES | 546 |
| | GGCACCGCTCCAGGTTCTACTAG | | PSGTAPGTSPSGESSTAP | |
| | CGAATCCCCGTCTGGTACCGCAC | | GTSESATPESGPGTSTEP | |
| | CAGGTACTTCTCCTAGCGGCGAA | | SEGSAPGTSTEPSEGSA | |
| | TCTTCTACCGCACCAGGTACCTCT | | PGTSTEPSEGSAPGTSES | |
| | GAAAGCGCTACTCCGGAGTCTGG | | ATPESGPGTSTEPSEGS | |
| | CCCAGGTACCTCTACTGAACCGT | | APGSSTPSGATGSPGAS | |
| | CTGAGGGTAGCGCTCCAGGTACT | | PGTSSTGSPGSSTPSGAT | |
| | TCTACTGAACCGTCCGAAGGTAG | | GSP | |
| | CGCACCAGGTACCTCTACTGAAC | | | |
| | CTTCTGAGGGCAGCGCTCCAGGT | | | |
| | ACTTCTGAAAGCGCTACCCCGGA | | | |
| | GTCCGGTCCAGGTACTTCTACTG | | | |
| | AACCGTCCGAAGGTAGCGCACCA | | | |
| | GGTAGCTCTACCCCGTCTGGTGC | | | |
| | TACCGGTTCCCCAGGTGCTTCTCC | | | |
| | TGGTACTAGCTCTACCGGTTCTCC | | | |
| | AGGTAGCTCTACCCCGTCTGGTG | | | |
| | CTACTGGCTCTCCA | | | |
| LCW462_r43 | GGTTCTACTAGCTCTACTGCAGA | 547 | GSTSSTAESPGPGTSPSG | 548 |
| | ATCTCCGGGCCCAGGTACCTCTC | | ESSTAPGTSPSGESSTAP | |
| | CTAGCGGTGAATCTTCTACCGCT | | GSTSSTAESPGPGSTSST | |
| | CCAGGTACTTCTCCGAGCGGTGA | | AESPGPGTSTPESGSASP | |
| | ATCTTCTACCGCTCCAGGTTCTAC | | GTSPSGESSTAPGSTSST | |
| | TAGCTCTACCGCTGAATCTCCGG | | AESPGPGTSTPESGSASP | |
| | GTCCAGGTTCTACCAGCTCTACT | | GSTSSTAESPGPGSTSES | |
| | GCAGAATCTCCTGGCCCAGGTAC | | PSGTAPGTSPSGESSTAP | |
| | TTCTACTCCGGAAAGCGGTTCCG | | | |
| | CTTCTCCAGGTACTTCTCCTAGCG | | | |
| | GTGAATCTTCTACCGCTCCAGGT | | | |
| | TCTACCAGCTCTACTGCTGAATCT | | | |
| | CCTGGCCCAGGTACTTCTACCCC | | | |
| | GGAAAGCGGCTCCGCTTCTCCAG | | | |
| | GTTCTACCAGCTCTACCGCTGAA | | | |
| | TCTCCTGGCCCAGGTTCTACTAG | | | |
| | CGAATCTCCGTCTGGCACCGCAC | | | |
| | CAGGTACTTCCCCTAGCGGTGAA | | | |
| | TCTTCTACTGCACCA | | | |
| LCW462_r45 | GGTACCTCTACTCCGGAAAGCGG | 549 | GTSTPESGSASPGSTSES | 550 |
| | TTCCGCATCTCCAGGTTCTACCA | | PSGTAPGSTSSTAESPGP | |
| | GCGAATCCCCGTCTGGCACCGCA | | GTSTEPSEGSAPGTSTEP | |
| | CCAGGTTCTACTAGCTCTACTGCT | | SEGSAPGTSESATPESG | |
| | GAATCTCCGGGCCCAGGTACCTC | | PGTSESATPESGPGTSTE | |
| | TACTGAACCTTCCGAAGGCAGCG | | PSEGSAPGTSTEPSEGS | |
| | CTCCAGGTACCTCTACCGAACCG | | APGTSESATPESGPGTS | |
| | TCCGAGGGCAGCGCACCAGGTAC | | TEPSEGSAPGTSTEPSEG | |
| | TTCTGAAAGCGCAACCCCTGAAT | | SAP | |
| | CCGGTCCAGGTACCTCTGAAAGC | | | |
| | GCTACTCCGGAGTCTGGCCCAGG | | | |
| | TACCTCTACTGAACCGTCTGAGG | | | |
| | GTAGCGCTCCAGGTACTTCTACT | | | |
| | GAACCGTCCGAAGGTAGCGCACC | | | |
| | AGGTACTTCTGAAAGCGCTACTC | | | |
| | CGGAGTCCGGTCCAGGTACCTCT | | | |
| | ACCGAACCGTCCGAAGGCAGCGC | | | |
| | TCCAGGTACTTCTACTGAACCTTC | | | |
| | TGAGGGTAGCGCTCCC | | | |
| LCW462_r47 | GGTACCTCTACCGAACCGTCCGA | 551 | GTSTEPSEGSAPGTSTEP | 552 |
| | GGGTAGCGCACCAGGTACCTCTA | | SEGSAPGSEPATSGSET | |
| | CTGAACCGTCTGAGGGTAGCGCT | | PGTSTEPSEGSAPGTSES | |
| | CCAGGTAGCGAACCGGCAACCTC | | ATPESGPGTSESATPES | |
| | CGGTTCTGAAACTCCAGGTACTT | | GPGASPGTSSTGSPGSS | |
| | CTACTGAACCGTCTGAAGGTAGC | | PSASTGTGPGSSTPSGA | |
| | GCACCAGGTACTTCTGAAAGCGC | | TGSPGSSTPSGATGSPG | |
| | AACCCCGGAATCCGGCCCAGGTA | | SSTPSGATGSPGASPGT | |
| | CCTCTGAAAGCGCAACCCCGGAG | | SSTGSP | |
| | TCCGGCCCAGGTGCATCTCCGGG | | | |
| | TACTAGCTCTACCGGTTCTCCAG | | | |
| | GTTCTAGCCCTTCTGCTTCCACTG | | | |
| | GTACCGGCCCAGGTAGCTCTACC | | | |
| | CCGTCTGGTGCTACTGGTTCCCC | | | |
| | AGGTAGCTCTACTCCGTCTGGTG | | | |
| | CAACCGGTTCCCCAGGTAGCTCT | | | |
| | ACTCCTTCTGGTGCTACTGGCTCC | | | |
| | CCAGGTGCATCCCCTGGCACCAG | | | |
| | CTCTACCGGTTCTCCA | | | |
| LCW462_r54 | GGTAGCGAACCGGCAACCTCTGG | 553 | GSEPATSGSETPGSEPA | 554 |
| | CTCTGAAACTCCAGGTAGCGAAC | | TSGSETPGTSTEPSEGSA | |
| | CTGCAACCTCCGGCTCTGAAACC | | PGSEPATSGSETPGTSES | |
| | CCAGGTACTTCTACTGAACCTTCT | | ATPESGPGTSTEPSEGS | |
| | GAGGGCAGCGCACCAGGTAGCG | | APGSSTPSGATGSPGSS | |
| | AACCTGCAACCTCTGGCTCTGAA | | TPSGATGSPGASPGTSS | |
| | ACCCCAGGTACCTCTGAAAGCGC | | TGSPGSSTPSGATGSPG | |
| | TACTCCTGAATCTGGCCCAGGTA | | ASPGTSSTGSPGSSTPSG | |
| | CTTCTACTGAACCGTCCGAGGGC | | ATGSP | |
| | AGCGCACCAGGTAGCTCTACTCC | | | |
| | GTCTGGTGCTACCGGCTCTCCAG | | | |
| | GTAGCTCTACCCCTTCTGGTGCA | | | |
| | ACCGGCTCCCCAGGTGCTTCTCC | | | |
| | GGGTACCAGCTCTACTGGTTCTC | | | |
| | CAGGTAGCTCTACCCCGTCTGGT | | | |
| | GCTACCGGTTCCCCAGGTGCTTC | | | |
| | TCCTGGTACTAGCTCTACCGGTTC | | | |
| | TCCAGGTAGCTCTACCCCGTCTG | | | |
| | GTGCTACTGGCTCTCCA | | | |
| LCW462_r55 | GGTACTTCTACCGAACCGTCCGA | 555 | GTSTEPSEGSAPGTSTEP | 556 |
| | GGGCAGCGCTCCAGGTACTTCTA | | SEGSAPGTSTEPSEGSA | |
| | CTGAACCTTCTGAAGGCAGCGCT | | PGTSESATPESGPGTSTE | |
| | CCAGGTACTTCTACTGAACCTTC | | PSEGSAPGTSTEPSEGS | |
| | CGAAGGTAGCGCACCAGGTACTT | | APGSTSESPSGTAPGTSP | |
| | CTGAAAGCGCTACTCCGGAGTCC | | SGESSTAPGTSPSGESST | |
| | GGTCCAGGTACCTCTACCGAACC | | APGSPAGSPTSTEEGTS | |
| | GTCCGAAGGCAGCGCTCCAGGTA | | ESATPESGPGTSTEPSEG | |
| | CTTCTACTGAACCTTCTGAGGGT | | SAP | |
| | AGCGCTCCAGGTTCTACTAGCGA | | | |
| | ATCTCCGTCTGGCACTGCTCCAG | | | |
| | GTACTTCTCCTAGCGGTGAATCTT | | | |
| | CTACCGCTCCAGGTACTTCCCCT | | | |
| | AGCGGCGAATCTTCTACCGCTCC | | | |
| | AGGTAGCCCGGCTGGCTCTCCTA | | | |
| | CCTCTACTGAGGAAGGTACTTCT | | | |
| | GAAAGCGCTACTCCTGAGTCTGG | | | |
| | TCCAGGTACCTCTACTGAACCGT | | | |
| | CCGAAGGTAGCGCTCCA | | | |
| LCW462_r57 | GGTACTTCTACTGAACCTTCCGA | 557 | GTSTEPSEGSAPGSEPA | 558 |
| | AGGTAGCGCTCCAGGTAGCGAAC | | TSGSETPGSPAGSPTSTE | |
| | CTGCTACTTCTGGTTCTGAAACCC | | EGSPAGSPTSTEEGTSES | |
| | CAGGTAGCCCGGCTGGCTCTCCG | | ATPESGPGTSTEPSEGS | |
| | ACCTCCACCGAGGAAGGTAGCCC | | APGTSTEPSEGSAPGTS | |
| | GGCAGGCTCTCCGACCTCTACTG | | TEPSEGSAPGTSESATPE | |
| | AGGAAGGTACTTCTGAAAGCGCA | | SGPGSSTPSGATGSPGS | |
| | ACCCCGGAGTCCGGCCCAGGTAC | | SPSASTGTGPGASPGTS | |
| | CTCTACCGAACCGTCTGAGGGCA | | STGSP | |
| | GCGCACCAGGTACCTCTACTGAA | | | |
| | CCTTCCGAAGGCAGCGCTCCAGG | | | |
| | TACCTCTACCGAACCGTCCGAGG | | | |
| | GCAGCGCACCAGGTACTTCTGAA | | | |
| | AGCGCAACCCCTGAATCCGGTCC | | | |
| | AGGTAGCTCTACTCCGTCTGGTG | | | |
| | CAACCGGCTCCCCAGGTTCTAGC | | | |
| | CCGTCTGCTTCCACTGGTACTGG | | | |
| | CCCAGGTGCTTCCCCGGGCACCA | | | |
| | GCTCTACTGGTTCTCCA | | | |
| LCW462_r61 | GGTAGCGAACCGGCTACTTCCGG | 559 | GSEPATSGSETPGSPAG | 560 |
| | CTCTGAGACTCCAGGTAGCCCTG | | SPTSTEEGTSESATPESG | |
| | CTGGCTCTCCGACCTCTACCGAA | | PGTSTEPSEGSAPGTSTE | |
| | GAAGGTACCTCTGAAAGCGCTAC | | PSEGSAPGTSESATPES | |
| | CCCTGAGTCTGGCCCAGGTACCT | | GPGTSTPESGSASPGSTS | |
| | CTACTGAACCTTCCGAAGGCAGC | | ESPSGTAPGSTSSTAESP | |
| | GCTCCAGGTACCTCTACCGAACC | | GPGTSESATPESGPGTS | |
| | GTCCGAGGGCAGCGCACCAGGTA | | TEPSEGSAPGTSTEPSEG | |
| | CTTCTGAAAGCGCAACCCCTGAA | | SAP | |
| | TCCGGTCCAGGTACCTCTACTCC | | | |
| | GGAAAGCGGTTCCGCATCTCCAG | | | |
| | GTTCTACCAGCGAATCCCCGTCT | | | |
| | GGCACCGCACCAGGTTCTACTAG | | | |
| | CTCTACTGCTGAATCTCCGGGCC | | | |
| | CAGGTACTTCTGAAAGCGCTACT | | | |
| | CCGGAGTCCGGTCCAGGTACCTC | | | |
| | TACCGAACCGTCCGAAGGCAGCG | | | |
| | CTCCAGGTACTTCTACTGAACCTT | | | |
| | CTGAGGGTAGCGCTCCA | | | |
| LCW462_r64 | GGTACTTCTACCGAACCGTCCGA | 561 | GTSTEPSEGSAPGTSTEP | 562 |
| | GGGCAGCGCTCCAGGTACTTCTA | | SEGSAPGTSTEPSEGSA | |
| | CTGAACCTTCTGAAGGCAGCGCT | | PGTSTEPSEGSAPGTSES | |
| | CCAGGTACTTCTACTGAACCTTC | | ATPESGPGTSESATPES | |
| | CGAAGGTAGCGCACCAGGTACCT | | GPGTPGSGTASSSPGSS | |
| | CTACCGAACCGTCTGAAGGTAGC | | TPSGATGSPGASPGTSS | |
| | GCACCAGGTACCTCTGAAAGCGC | | TGSPGSTSSTAESPGPG | |
| | AACTCCTGAGTCCGGTCCAGGTA | | TSPSGESSTAPGTSTPES | |
| | CTTCTGAAAGCGCAACCCCGGAG | | GSASP | |
| | TCTGGCCCAGGTACTCCTGGCAG | | | |
| | CGGTACCGCATCTTCCTCTCCAG | | | |
| | GTAGCTCTACTCCGTCTGGTGCA | | | |
| | ACTGGTTCCCCAGGTGCTTCTCC | | | |
| | GGGTACCAGCTCTACCGGTTCTC | | | |
| | CAGGTTCCACCAGCTCTACTGCT | | | |
| | GAATCTCCTGGTCCAGGTACCTC | | | |
| | TCCTAGCGGTGAATCTTCTACTG | | | |
| | CTCCAGGTACTTCTACTCCTGAA | | | |
| | AGCGGCTCTGCTTCTCCA | | | |
| LCW462_r67 | GGTAGCCCGGCAGGCTCTCCGAC | 563 | GSPAGSPTSTEEGTSES | 564 |
| | CTCTACTGAGGAAGGTACTTCTG | | ATPESGPGTSTEPSEGS | |
| | AAAGCGCAACCCCGGAGTCCGGC | | APGTSESATPESGPGSE | |
| | CCAGGTACCTCTACCGAACCGTC | | PATSGSETPGTSTEPSEG | |
| | TGAGGGCAGCGCACCAGGTACTT | | SAPGSPAGSPTSTEEGT | |
| | CTGAAAGCGCAACCCCTGAATCC | | STEPSEGSAPGTSTEPSE | |
| | GGTCCAGGTAGCGAACCGGCTAC | | GSAPGTSTEPSEGSAPG | |
| | TTCTGGCTCTGAGACTCCAGGTA | | TSTEPSEGSAPGTSTEPS | |
| | CTTCTACCGAACCGTCCGAAGGT | | EGSAP | |
| | AGCGCACCAGGTAGCCCGGCTGG | | | |
| | TTCTCCGACTTCCACCGAGGAAG | | | |
| | GTACCTCTACTGAACCTTCTGAG | | | |
| | GGTAGCGCTCCAGGTACCTCTAC | | | |
| | TGAACCTTCCGAAGGCAGCGCTC | | | |
| | CAGGTACTTCTACCGAACCGTCC | | | |
| | GAGGGCAGCGCTCCAGGTACTTC | | | |
| | TACTGAACCTTCTGAAGGCAGCG | | | |
| | CTCCAGGTACTTCTACTGAACCTT | | | |
| | CCGAAGGTAGCGCACCA | | | |
| LCW462_r69 | GGTACTTCTCCGAGCGGTGAATC | 565 | GTSPSGESSTAPGSTSST | 566 |
| | TTCTACCGCACCAGGTTCTACTA | | AESPGPGTSPSGESSTAP | |
| | GCTCTACCGCTGAATCTCCGGGC | | GTSESATPESGPGTSTEP | |
| | CCAGGTACTTCTCCGAGCGGTGA | | SEGSAPGTSTEPSEGSA | |
| | ATCTTCTACTGCTCCAGGTACCTC | | PGSSPSASTGTGPGSSTP | |
| | TGAAAGCGCTACTCCGGAGTCTG | | SGATGSPGASPGTSSTG | |
| | GCCCAGGTACCTCTACTGAACCG | | SPGTSTPESGSASPGTSP | |
| | TCTGAGGGTAGCGCTCCAGGTAC | | SGESSTAPGTSPSGESST | |
| | TTCTACTGAACCGTCCGAAGGTA | | AP | |
| | GCGCACCAGGTTCTAGCCCTTCT | | | |
| | GCATCTACTGGTACTGGCCCAGG | | | |
| | TAGCTCTACTCCTTCTGGTGCTAC | | | |
| | CGGCTCTCCAGGTGCTTCTCCGG | | | |
| | GTACTAGCTCTACCGGTTCTCCA | | | |
| | GGTACTTCTACTCCGGAAAGCGG | | | |
| | TTCCGCATCTCCAGGTACTTCTCC | | | |
| | TAGCGGTGAATCTTCTACTGCTC | | | |
| | CAGGTACCTCTCCTAGCGGCGAA | | | |
| | TCTTCTACTGCTCCA | | | |
| LCW462_r70 | GGTACCTCTGAAAGCGCTACTCC | 567 | GTSESATPESGPGTSTEP | 568 |
| | GGAGTCTGGCCCAGGTACCTCTA | | SEGSAPGTSTEPSEGSA | |
| | CTGAACCGTCTGAGGGTAGCGCT | | PGSPAGSPTSTEEGSPA | |
| | CCAGGTACTTCTACTGAACCGTC | | GSPTSTEEGTSTEPSEGS | |
| | CGAAGGTAGCGCACCAGGTAGCC | | APGSSPSASTGTGPGSS | |
| | CTGCTGGCTCTCCGACTTCTACTG | | TPSGATGSPGSSTPSGA | |
| | AGGAAGGTAGCCCGGCTGGTTCT | | TGSPGSEPATSGSETPG | |
| | CCGACTTCTACTGAGGAAGGTAC | | TSESATPESGPGSEPATS | |
| | TTCTACCGAACCTTCCGAAGGTA | | GSETP | |
| | GCGCTCCAGGTTCTAGCCCTTCT | | | |
| | GCTTCCACCGGTACTGGCCCAGG | | | |
| | TAGCTCTACCCCTTCTGGTGCTAC | | | |
| | CGGCTCCCCAGGTAGCTCTACTC | | | |
| | CTTCTGGTGCAACTGGCTCTCCA | | | |
| | GGTAGCGAACCGGCAACTTCCGG | | | |
| | CTCTGAAACCCCAGGTACTTCTG | | | |
| | AAAGCGCTACTCCTGAGTCTGGC | | | |
| | CCAGGTAGCGAACCTGCTACCTC | | | |
| | TGGCTCTGAAACCCCA | | | |
| LCW462_r72 | GGTACTTCTACCGAACCGTCCGA | 569 | GTSTEPSEGSAPGTSTEP | 570 |
| | AGGCAGCGCTCCAGGTACCTCTA | | SEGSAPGTSTEPSEGSA | |
| | CTGAACCTTCCGAGGGCAGCGCT | | PGSSTPSGATGSPGASP | |
| | CCAGGTACCTCTACCGAACCTTC | | GTSSTGSPGSSTPSGAT | |
| | TGAAGGTAGCGCACCAGGTAGCT | | GSPGTSESATPESGPGS | |
| | CTACCCCGTCTGGTGCTACCGGT | | EPATSGSETPGTSTEPSE | |
| | TCCCCAGGTGCTTCTCCTGGTACT | | GSAPGSTSESPSGTAPG | |
| | AGCTCTACCGGTTCTCCAGGTAG | | STSESPSGTAPGTSTPES | |
| | CTCTACCCCGTCTGGTGCTACTG | | GSASP | |
| | GCTCTCCAGGTACTTCTGAAAGC | | | |
| | GCAACCCCTGAATCCGGTCCAGG | | | |
| | TAGCGAACCGGCTACTTCTGGCT | | | |
| | CTGAGACTCCAGGTACTTCTACC | | | |
| | GAACCGTCCGAAGGTAGCGCACC | | | |
| | AGGTTCTACTAGCGAATCTCCTT | | | |
| | CTGGCACTGCACCAGGTTCTACC | | | |
| | AGCGAATCTCCGTCTGGCACTGC | | | |
| | ACCAGGTACCTCTACCCCTGAAA | | | |
| | GCGGTTCCGCTTCTCCA | | | |
| LCW462_r73 | GGTACCTCTACTCCTGAAAGCGG | 571 | GTSTPESGSASPGSTSST | 572 |
| | TTCTGCATCTCCAGGTTCCACTAG | | AESPGPGSTSSTAESPGP | |
| | CTCTACCGCAGAATCTCCGGGCC | | GSSPSASTGTGPGSSTPS | |
| | CAGGTTCTACTAGCTCTACTGCT | | GATGSPGASPGTSSTGS | |
| | GAATCTCCTGGCCCAGGTTCTAG | | PGSEPATSGSETPGTSES | |
| | CCCTTCTGCATCTACTGGTACTGG | | ATPESGPGSPAGSPTST | |
| | CCCAGGTAGCTCTACTCCTTCTG | | EEGSTSESPSGTAPGSTS | |
| | GTGCTACCGGCTCTCCAGGTGCT | | ESPSGTAPGTSTPESGS | |
| | TCTCCGGGTACTAGCTCTACCGG | | ASP | |
| | TTCTCCAGGTAGCGAACCGGCAA | | | |
| | CCTCCGGCTCTGAAACCCCAGGT | | | |
| | ACCTCTGAAAGCGCTACTCCTGA | | | |
| | ATCCGGCCCAGGTAGCCCGGCAG | | | |
| | GTTCTCCGACTTCCACTGAGGAA | | | |
| | GGTTCTACTAGCGAATCTCCTTCT | | | |
| | GGCACTGCACCAGGTTCTACCAG | | | |
| | CGAATCTCCGTCTGGCACTGCAC | | | |
| | CAGGTACCTCTACCCCTGAAAGC | | | |
| | GGTTCCGCTTCTCCC | | | |
| LCW462_r78 | GGTAGCCCGGCTGGCTCTCCTAC | 573 | GSPAGSPTSTEEGTSES | 574 |
| | CTCTACTGAGGAAGGTACTTCTG | | ATPESGPGTSTEPSEGS | |
| | AAAGCGCTACTCCTGAGTCTGGT | | APGSTSESPSGTAPGSTS | |
| | CCAGGTACCTCTACTGAACCGTC | | ESPSGTAPGTSPSGESST | |
| | CGAAGGTAGCGCTCCAGGTTCTA | | APGTSTEPSEGSAPGSP | |
| | CCAGCGAATCTCCTTCTGGCACC | | AGSPTSTEEGTSTEPSE | |
| | GCTCCAGGTTCTACTAGCGAATC | | GSAPGSEPATSGSETPG | |
| | CCCGTCTGGTACCGCACCAGGTA | | TSESATPESGPGTSTEPS | |
| | CTTCTCCTAGCGGCGAATCTTCTA | | EGSAP | |
| | CCGCACCAGGTACCTCTACCGAA | | | |
| | CCTTCCGAAGGTAGCGCTCCAGG | | | |
| | TAGCCCGGCAGGTTCTCCTACTT | | | |
| | CCACTGAGGAAGGTACTTCTACC | | | |
| | GAACCTTCTGAGGGTAGCGCACC | | | |
| | AGGTAGCGAACCTGCAACCTCTG | | | |
| | GCTCTGAAACCCCAGGTACCTCT | | | |
| | GAAAGCGCTACTCCTGAATCTGG | | | |
| | CCCAGGTACTTCTACTGAACCGT | | | |
| | CCGAGGGCAGCGCACCA | | | |
| LCW462_r79 | GGTACCTCTACCGAACCTTCCGA | 575 | GTSTEPSEGSAPGSPAG | 576 |
| | AGGTAGCGCTCCAGGTAGCCCGG | | SPTSTEEGTSTEPSEGSA | |
| | CAGGTTCTCCTACTTCCACTGAG | | PGTSPSGESSTAPGTSPS | |
| | GAAGGTACTTCTACCGAACCTTC | | GESSTAPGTSPSGESST | |
| | TGAGGGTAGCGCACCAGGTACCT | | APGSTSESPSGTAPGSTS | |
| | CCCCTAGCGGCGAATCTTCTACT | | ESPSGTAPGTSTPESGS | |
| | GCTCCAGGTACCTCTCCTAGCGG | | ASPGSEPATSGSETPGT | |
| | CGAATCTTCTACCGCTCCAGGTA | | SESATPESGPGTSTEPSE | |
| | CCTCCCCTAGCGGTGAATCTTCT | | GSAP | |
| | ACCGCACCAGGTTCTACCAGCGA | | | |
| | ATCCCCTTCTGGTACTGCTCCAG | | | |
| | GTTCTACCAGCGAATCCCCTTCT | | | |
| | GGCACCGCACCAGGTACTTCTAC | | | |
| | CCCTGAAAGCGGCTCCGCTTCTC | | | |
| | CAGGTAGCGAACCTGCAACCTCT | | | |
| | GGCTCTGAAACCCCAGGTACCTC | | | |
| | TGAAAGCGCTACTCCTGAATCTG | | | |
| | GCCCAGGTACTTCTACTGAACCG | | | |
| | TCCGAGGGCAGCGCACCA | | | |
| LCW462_r87 | GGTAGCGAACCGGCAACCTCTGG | 577 | GSEPATSGSETPGTSES | 578 |
| | CTCTGAAACCCCAGGTACCTCTG | | ATPESGPGTSESATPES | |
| | AAAGCGCTACTCCGGAATCTGGT | | GPGTSPSGESSTAPGSTS | |
| | CCAGGTACTTCTGAAAGCGCTAC | | STAESPGPGTSPSGESST | |
| | TCCGGAATCCGGTCCAGGTACTT | | APGSTSESPSGTAPGTSP | |
| | CTCCGAGCGGTGAATCTTCTACC | | SGESSTAPGSTSSTAESP | |
| | GCACCAGGTTCTACTAGCTCTAC | | GPGSSTPSGATGSPGSS | |
| | CGCTGAATCTCCGGGCCCAGGTA | | TPSGATGSPGSSTPSGA | |
| | CTTCTCCGAGCGGTGAATCTTCT | | NWLS | |
| | ACTGCTCCAGGTTCTACTAGCGA | | | |
| | ATCCCCGTCTGGTACTGCTCCAG | | | |
| | GTACTTCCCCTAGCGGTGAATCT | | | |
| | TCTACTGCTCCAGGTTCTACCAG | | | |
| | CTCTACCGCAGAATCTCCGGGTC | | | |
| | CAGGTAGCTCTACTCCGTCTGGT | | | |
| | GCAACCGGTTCCCCAGGTAGCTC | | | |
| | TACCCCTTCTGGTGCAACCGGCT | | | |
| | CCCCAGGTAGCTCTACCCCTTCT | | | |
| | GGTGCAAACTGGCTCTCC | | | |
| LCW462_r88 | GGTAGCCCTGCTGGCTCTCCGAC | 579 | GSPAGSPTSTEEGSPAG | 580 |
| | TTCTACTGAGGAAGGTAGCCCGG | | SPTSTEEGTSTEPSEGSA | |
| | CTGGTTCTCCGACTTCTACTGAG | | PGTSTEPSEGSAPGTSTE | |
| | GAAGGTACTTCTACCGAACCTTC | | PSEGSAPGTSESATPES | |
| | CGAAGGTAGCGCTCCAGGTACCT | | GPGASPGTSSTGSPGSS | |
| | CTACTGAACCTTCCGAAGGCAGC | | TPSGATGSPGASPGTSS | |
| | GCTCCAGGTACCTCTACCGAACC | | TGSPGSSTPSGATGSPG | |
| | GTCCGAGGGCAGCGCACCAGGTA | | TPGSGTASSSPGSSTPSG | |
| | CTTCTGAAAGCGCAACCCCTGAA | | ATGSP | |
| | TCCGGTCCAGGTGCATCTCCTGG | | | |
| | TACCAGCTCTACCGGTTCTCCAG | | | |
| | GTAGCTCTACTCCTTCTGGTGCTA | | | |
| | CTGGCTCTCCAGGTGCTTCCCCG | | | |
| | GGTACCAGCTCTACCGGTTCTCC | | | |
| | AGGTAGCTCTACCCCGTCTGGTG | | | |
| | CTACTGGTTCTCCAGGTACTCCG | | | |
| | GGCAGCGGTACTGCTTCTTCCTCT | | | |
| | CCAGGTAGCTCTACCCCTTCTGG | | | |
| | TGCTACTGGCTCTCCA | | | |
| LCW462_r89 | GGTAGCTCTACCCCGTCTGGTGC | 581 | GSSTPSGATGSPGTPGS | 582 |
| | TACTGGTTCTCCAGGTACTCCGG | | GTASSSPGSSTPSGATG | |
| | GCAGCGGTACTGCTTCTTCCTCTC | | SPGSPAGSPTSTEEGTSE | |
| | CAGGTAGCTCTACCCCTTCTGGT | | SATPESGPGTSTEPSEGS | |
| | GCTACTGGCTCTCCAGGTAGCCC | | APGTSESATPESGPGSE | |
| | GGCTGGCTCTCCTACCTCTACTG | | PATSGSETPGTSESATPE | |
| | AGGAAGGTACTTCTGAAAGCGCT | | SGPGTSTEPSEGSAPGT | |
| | ACTCCTGAGTCTGGTCCAGGTAC | | SESATPESGPGTSESATP | |
| | CTCTACTGAACCGTCCGAAGGTA | | ESGP | |
| | GCGCTCCAGGTACCTCTGAAAGC | | | |
| | GCAACTCCTGAGTCTGGCCCAGG | | | |
| | TAGCGAACCTGCTACCTCCGGCT | | | |
| | CTGAGACTCCAGGTACCTCTGAA | | | |
| | AGCGCAACCCCGGAATCTGGTCC | | | |
| | AGGTACTTCTACTGAACCGTCTG | | | |
| | AAGGTAGCGCACCAGGTACTTCT | | | |
| | GAAAGCGCAACCCCGGAATCCG | | | |
| | GCCCAGGTACCTCTGAAAGCGCA | | | |
| | ACCCCGGAGTCCGGCCCA | | | |

### Example 7

### Construction of XTEN_AM288

[0328] The entire library LCW0462 was dimerized as described in Example 6 resulting in a library of XTEN_AM288 clones designated LCW0463. 1512 isolates from library LCW0463 were screened using the protocol described in Example 6. 176 highly expressing clones were sequenced and 40 preferred XTEN_AM288 segments were chosen for the construction of multifunctional proteins that contain multiple XTEN segments with 288 amino acid residues.

### Example 8

### Construction of XTEN_AM432

[0329] We generated a library of XTEN_AM432 segments by recombining segments from library LCW0462 of XTEN_AM144 segments and segments from library LCW0463 of XTEN_AM288 segments. This new library of XTEN_AM432 segment was designated LCW0464. Plasmid was isolated from cultures of E. coli harboring LCW0462 and LCW0463, respectively. 1512 isolates from library LCW0464 were screened using the protocol described in Example 6. 176 highly expressing clones were sequenced and 39 preferred XTEN_AM432 segment were chosen for the construction of longer XTENs and for the construction of multifunctional proteins that contain multiple XTEN segments with 432 amino acid residues.

[0330] In parallel we constructed library LMS0100 of XTEN_AM432 segments using preferred segments of XTEN_AM144 and XTEN_AM288. Screening of this library yielded 4 isolates that were selected for further construction

### Example 9

### Construction of XTEN_AM875

[0331] The stuffer vector pCW0359 was digested with BsaI and KpnI to remove the stuffer segment and the resulting vector fragment was isolated by agarose gel purification.

[0332] We annealed the phosphorylated oligonucleotide BsaI-AscI-KpnIforP: AGGTGCAAGCGCAAGCGGCGCGCCAAGCACGGGAGGTTCGTCTTCACTCGAGGGTAC (SEQ ID NO: 583) and the non-phosphorylated oligonucleotide BsaI-AscI-KpnIrev: CCTCGAGTGAAGACGAACCTCCCGTGCTTGGCGCGCCGCTTGCGCTTGC (SEQ ID NO: 584) for introducing the sequencing island A (SI-A) which encodes amino acids GASASGAPSTG (SEQ ID NO: 585) and has the restriction enzyme AscI recognition nucleotide sequence GGCGCGCC inside. The annealed oligonucleotide pairs were ligated with BsaI and KpnI digested stuffer vector pCW0359 prepared above to yield pCW0466 containing SI-A. We then generated a library of XTEN_AM443 segments by recombining 43 preferred XTEN_AM432 segments from Example 8 and SI-A segments from pCW0466 at C-terminus using the same dimerization process described in Example 5. This new library of XTEN_AM443 segments was designated LCW0479.

[0333] We generated a library of XTEN_AM875 segments by recombining segments from library LCW0479 of XTEN_AM443 segments and 43 preferred XTEN_AM432 segments from Example 8 using the same dimerization process described in Example 5. This new library of XTEN_AM875 segment was designated LCW0481.

### Example 10

### Construction of XTEN_AM1318

[0334] We annealed the phosphorylated oligonucleotide BsaI-FseI-KpnIforP: AGGTCCAGAACCAACGGGGCCGGCCCCAAGCGGAGGTTCGTCTTCACTCGAGGGTAC (SEQ ID NO: 586) and the non-phosphorylated oligonucleotide BsaI-FseI-KpnIrev: CCTCGAGTGAAGACGAACCTCCGCTTGGGGCCGGCCCCGTTGGTTCTGG (SEQ ID NO: 587) for introducing the sequencing island B (SI-B) which encodes amino acids GPEPTGPAPSG (SEQ ID NO: 588) and has the restriction enzyme FseI recognition nucleotide sequence GGCCGGCC inside. The annealed oligonucleotide pairs were ligated with BsaI and KpnI digested stuffer vector pCW0359 as used in Example 9 to yield pCW0467 containing SI-B. We then generated a library of XTEN_AM443 segments by recombining 43 preferred XTEN_AM432 segments from Example 8 and SI-B segments from pCW0467 at C-terminus using the same dimerization process described in Example 5. This new library of XTEN_AM443 segments was designated LCW0480.

[0335] We generated a library of XTEN_AM1318 segments by recombining segments from library LCW0480 of XTEN_AM443 segments and segments from library LCW0481 of XTEN_AM875 segments using the same dimerization process as in Example 5. This new library of XTEN_AM1318 segment was designated LCW0487.

### Example 11

### Construction of XTEN_AD864

[0336] Using the several consecutive rounds of dimerization, we assembled a collection of XTEN_AD864 sequences starting from segments of XTEN_AD36 listed in Example 1. These sequences were assembled as described in Example 5. Several isolates from XTEN_AD864 were evaluated and found to show good expression and excellent solubility under physiological conditions. One intermediate construct of XTEN_AD576 was sequenced. This clone was evaluated in a PK experiment in cynomolgus monkeys and a half-life of about 20 h was measured.

### Example 12

### Construction of XTEN_AF864

[0337] Using the several consecutive rounds of dimerization, we assembled a collection of XTEN_AF864 sequences starting from segments of XTEN_AF36 listed in Example 3. These sequences were assembled as described in Example 5. Several isolates from XTEN_AF864 were evaluated and found to show good expression and excellent solubility under physiological conditions. One intermediate construct of XTEN_AF540 was sequenced. This clone was evaluated in a PK experiment in cynomolgus monkeys and a half-life of about 20 h was measured. A full length clone of XTEN_AF864 had excellent solubility and showed half-life exceeding 60 h in cynomolgus monkeys. A second set of XTEN_AF sequences was assembled including a sequencing island as described in Example 9.

### Example 13

### Construction of XTEN_AG864

[0338] Using the several consecutive rounds of dimerization, we assembled a collection of XTEN_AG864 sequences starting from segments of XTEN_AD36 listed in Example 1. These sequences were assembled as described in Example 5. Several isolates from XTEN_AG864 were evaluated and found to show good expression and excellent solubility under physiological conditions. A full-length clone of XTEN_AG864 had excellent solubility and showed half-life exceeding 60 h in cynomolgus monkeys.

### Example 14

### Construction of N-Terminal Extensions of XTEN—Construction and Screening of 12mer Addition Libraries

[0339] This example details a step in the optimization of the N-terminus of the XTEN protein to promote the initiation of translation to allow for expression of XTEN fusions at the N-terminus of fusion proteins without the presence of a helper domain. Historically expression of proteins with XTEN at the N-terminus was poor, yielding values that would essentially undetectable in the GFP fluorescence assay (<25% of the expression with the N-terminal CBD helper domain) To create diversity at the codon level, seven amino acid sequences were selected and prepared with a diversity of codons. Seven pairs of oligonucleotides encoding 12 amino acids with codon diversities were designed, annealed and ligated into the NdeI/BsaI restriction enzyme digested stuffer vector pCW0551 (Stuffer-XTEN_AM875-GFP), and transformed into E. coli BL21Gold(DE3) competent cells to obtain colonies of seven libraries. The resulting clones have N-terminal XTEN 12mers fused in-frame to XTEN_AM875-GFP to allow use of GFP fluorescence for screening the expression. Individual colonies from the seven created libraries were picked and grown overnight to saturation in 500 μl of super broth media in a 96 deep well plate. The number of colonies picked ranged from approximately half to a third of the theoretical diversity of the library (see Table 13).

TABLE 13
Theoretical Diversity and Sampling Numbers for 12mer Addition
Libraries. The amino acid residues with randomized codons
are underlined.

| | | Amino Acid | SEQ ID | Theoretical | Number |
|---|---|---|---|---|---|
| Library | Motif Family | Sequence | NO: | Diversity | screened |
| LCW546 | AE12 | MASPAGSPTSTEE | 589 | 572 | 2 plates (168) |
| LCW547 | AE12 | MATSESATPESGP | 590 | 1536 | 5 plates (420) |
| LCW548 | AF12 | MATSPSGESSTAP | 591 | 192 | 2 plates (168) |
| LCW549 | AF12 | MESTSSTAESPGP | 592 | 384 | 2 plates (168) |
| LCW552 | AG12 | MASSTPSGATGSP | 593 | 384 | 2 plates (168) |
| LCW553 | AG12 | MEASPGTSSTGSP | 594 | 384 | 2 plates (168) |
| LCW554 | (CBD-like) | MASTPESGSSG | 595 | 32 | 1 plate (84) |

[0340] The saturated overnight cultures were used to inoculate fresh 500 μl cultures in auto-induction media in which they were grown overnight at 26° C. These expression cultures were then assayed using a fluorescence plate reader (excitation 395 nm, emission 510 nm) to determine the amount of GFP reporter present (see FIG. 9 for results of expression assays). The results, graphed as box and whisker plots, indicate that while median expression levels were approximately half of the expression levels compared to the “benchmark” CBD N-terminal helper domain, the best clones from the libraries were much closer to the benchmarks, indicating that further optimization around those sequences was warranted. This is in contrast to previous XTEN versions that were <25% of the expression levels of the CBD N-terminal benchmark. The results also show that the libraries starting with amino acids MA had better expression levels than those beginning with ME. This was most apparent when looking at the best clones, which were closer to the benchmarks as they mostly start with MA. Of the 176 clones within 33% of the CBD-AM875 benchmark, 87% begin with MA, where as only 75% of the sequences in the libraries beginning with MA, a clear over representation of the clones beginning with MA at the highest level of expression. 96 of the best clones were sequenced to confirm identity and twelve sequences (see Table 14), 4 from LCW546, 4 from LCW547 and 4 from LCW552 were selected for further optimization.

TABLE 14
Advanced 12mer DNA Nucleotide Sequences

| | | SEQ ID |
|---|---|---|
| Clone | DNA Nucleotide Sequence | NO: |
| LCW546_02 | ATGGCTAGTCCGGCTGGCTCTCCGACCTCCACTGAGGAAGGTACTTCTACT | 596 |
| LCW546_06 | ATGGCTAGTCCTGCTGGCTCTCCAACCTCCACTGAGGAAGGTACTTCTACT | 597 |
| LCW546_07 | ATGGCTAGTCCAGCAGGCTCTCCTACCTCCACCGAGGAAGGTACTTCTACT | 598 |
| LCW546_09 | ATGGCTAGTCCTGCTGGCTCTCCGACCTCTACTGAGGAAGGTACTTCTACT | 599 |
| LCW547_03 | ATGGCTACATCCGAAAGCGCAACCCCTGAGTCCGGTCCAGGTACTTCTACT | 600 |
| LCW547_06 | ATGGCTACATCCGAAAGCGCAACCCCTGAATCTGGTCCAGGTACTTCTACT | 601 |
| LCW547_10 | ATGGCTACGTCTGAAAGCGCTACTCCGGAATCTGGTCCAGGTACTTCTACT | 602 |
| LCW547_17 | ATGGCTACGTCCGAAAGCGCTACCCCTGAATCCGGTCCAGGTACTTCTACT | 603 |
| LCW552_03 | ATGGCTAGTTCTACCCCGTCTGGTGCAACCGGTTCCCCAGGTACTTCTACT | 604 |
| LCW552_05 | ATGGCTAGCTCCACTCCGTCTGGTGCTACCGGTTCCCCAGGTACTTCTACT | 605 |
| LCW552_10 | ATGGCTAGCTCTACTCCGTCTGGTGCTACTGGTTCCCCAGGTACTTCTACT | 606 |
| LCW552_11 | ATGGCTAGTTCTACCCCTTCTGGTGCTACTGGTTCTCCAGGTACTTCTACT | 607 |

### Example 15

### Construction of N-Terminal Extensions of XTEN—Construction and Screening of Libraries Optimizing Codons 3 and 4

[0341] This example details a step in the optimization of the N-terminus of the XTEN protein to promote the initiation of translation to allow for expression of XTEN fusions at the N-terminus of proteins without the presence of a helper domain. With preferences for the first two codons established (see Example supra), the third and fourth codons were randomized to determine preferences. Three libraries, based upon best clones from LCW546, LCW547 and LCW552, were designed with the third and fourth residues modified such that all combinations of allowable XTEN codons were present at these positions (see FIG. 10). In order to include all the allowable XTEN codons for each library, nine pairs of oligonucleotides encoding 12 amino acids with codon diversities of third and fourth residues were designed, annealed and ligated into the NdeI/BsaI restriction enzyme digested stuffer vector pCW0551 (Stuffer-XTEN_AM875-GFP), and transformed into E. coli BL21Gold(DE3) competent cells to obtain colonies of three libraries LCW0569-571. With 24 XTEN codons the theoretical diversity of each library is 576 unique clones. A total of 504 individual colonies from the three created libraries were picked and grown overnight to saturation in 500 μl of super broth media in a 96 deep well plate. This provided sufficient coverage to understand relative library performance and sequence preferences. The saturated overnight cultures were used to inoculate new 500 μl cultures in auto-induction media in which were grown overnight at 26° C. These expression cultures were then assayed using a fluorescence plate reader (excitation 395 nm, emission 510 nm) to determine the amount of GFP reporter present. The top 75 clones from the screen were sequenced and retested for GFP reporter expression versus the benchmark samples (see FIG. 11). 52 clones yielded usable sequencing data and were used for subsequent analysis. The results were broken down by library and indicate that LCW546 was the superior library. The results are presented in Table 15. Surprisingly, it was discovered that base-lined fluorescence readings for the best clones were ˜900 AU, whereas the CBD N-terminal benchmark was only ˜600 AU. This indicates that this library had instituted an approximately 33% improvement over the best clones from the previous library which were approximately equal in expression to the CBD N-terminal benchmark (Example 14).

TABLE 15
Third and Fourth Codon Optimization Library Comparison

| | LCW569 | LCW570 | LCW571 |
|---|---|---|---|
| N | 21 | 15 | 16 |
| Mean Fluorescence (AU) | 628 | 491 | 537 |
| SD | 173 | 71 | 232 |
| CV | 28% | 15% | 43% |

[0342] Further trends were seen in the data showing preferences for particular codons at the third and fourth position. Within the LCW569 library the glutamate codon GAA at the third position and the threonine codon ACT were associated with higher expression as seen in Table 16.

TABLE 16
Preferred Third and Fourth Codons in LCW569

| | 3 = GAA | Rest | 4 = ACT | Rest |
|---|---|---|---|---|
| N | 8 | 13 | 4 | 17 |
| Mean Fluorescence (AU) | 749 | 554 | 744 | 601 |
| SD | 234 | 47 | 197 | 162 |
| CV | 31% | 9% | 26% | 27% |

[0343] Additionally, the retest of the top 75 clones indicated that several were now superior to the benchmark clones.

### Example 16

### Construction of N-Terminal Extensions of XTEN—Construction and Screening of Combinatorial 12mer and 36mer Libraries

[0344] This example details a step in the optimization of the N-terminus of the XTEN protein to promote the initiation of translation to allow for expression of XTEN fusions at the N-terminus of proteins without the presence of a helper domain. With preferences for the first two codons established (see Example supra), the N-terminus was examined in a broader context by combining the 12 selected 12mer sequences (see Example supra) at the very N-terminus followed by 125 previously constructed 36mer segments (see example supra) in a combinatorial manner. This created novel 48mers at the N-terminus of the XTEN protein and enabled the assessment of the impact of longer-range interactions at the N-terminus on expression of the longer sequences (FIG. 12). Similar to the dimerization procedures used to assemble 36mers (see Example infra), the plasmids containing the 125 selected 36mer segments were digested with restriction enzymes BbsI/NcoI and the appropriate fragment was gel-purified. The plasmid from clone AC94 (CBD-XTEN_AM875-GFP) was also digested with BsaI/NcoI and the appropriate fragments were gel-purified. These fragments were ligated together and transformed into E. coli BL21Gold(DE3) competent cells to obtain colonies of the library LCW0579, which also served as the vector for further cloning 12 selected 12mers at the very N-terminus. The plasmids of LCW0579 were digested with NdeI/EcoRI/BsaI and the appropriate fragments were gel-purified. 12 pairs of oligonucleotides encoding 12 selected 12mer sequences were designed, annealed and ligated with the NdeI/EcoRI/BsaI digested LCW0579 vector, and transformed into E. coli BL21Gold(DE3) competent cells to obtain colonies of the library LCW0580. With a theoretical diversity of 1500 unique clones, a total of 1512 individual colonies from the created library were picked and grown overnight to saturation in 500 μl of super broth media in a 96 deep well plate. This provided sufficient coverage to understand relative library performance and sequence preferences. The saturated overnight cultures were used to inoculate new 500 μl cultures in auto-induction media that were grown overnight at 26° C. These expression cultures were then assayed using a fluorescence plate reader (excitation 395 nm, emission 510 nm) to determine the amount of GFP reporter present. The top 90 clones were sequenced and retested for GFP reporter expression. 83 clones yielded usable sequencing data and were used for subsequent analysis. The sequencing data was used to determine the lead 12mer that was present in each clone and the impact of each 12mer on expression was assessed. Clones LCW546_06 and LCW546_09 stood out as being the superior N-terminus (see Table 17).

TABLE 17
Relative Performance of Clones Starting with
LCW546 06 and LCW459 09

| | LCW546_06 | All Others | LCW546_09 | All Others |
|---|---|---|---|---|
| N | 11 | 72 | 9 | 74 |
| Mean | 1100 | 752 | 988 | 775 |
| Fluorescence | | | | |
| (AU) | | | | |
| SD | 275 | 154 | 179 | 202 |
| CV | 25% | 20% | 18% | 26% |

[0345] The sequencing and retest also revealed several instances of independent replicates of the same sequence in the data producing similar results, thus increasing confidence in the assay. Additionally, 10 clones with 6 unique sequences were superior to the benchmark clone. They are presented in Table 18. It was noted that these were the only occurrences of these sequences and in no case did one of these sequences occur and fail to beat the bench-mark clone. These six sequences were advanced for further optimization.

TABLE 18
Combinatorial 12mer and 36mer Clones Superior to Benchmark Clone

| Clone Name | First 60 codons | SEQ ID NO: | 12mer Name | 36mer Name |
|---|---|---|---|---|
| LCW580_51 | ATGGCTAGTCCTGCTGGCTCTCCAACCTCCACT | 608 | LCW546_06 | LCW0404_040 |
| | GAGGAAGGTGCATCCCCGGGCACCAGCTCTACC | | | |
| | GGTTCTCCAGGTAGCTCTACCCCGTCTGGTGCT | | | |
| | ACCGGCTCTCCAGGTAGCTCTACCCCGTCTGGT | | | |
| | GCTACTGGCTCTCCAGGTACTTCTACTGAACCG | | | |
| | TCTGAAGGCAGCGCA | | | |
| LCW580_81 | ATGGCTAGTCCTGCTGGCTCTCCAACCTCCACT | 609 | LCW546_06 | LCW0404_040 |
| | GAGGAAGGTGCATCCCCGGGCACCAGCTCTACC | | | |
| | GGTTCTCCAGGTAGCTCTACCCCGTCTGGTGCT | | | |
| | ACCGGCTCTCCAGGTAGCTCTACCCCGTCTGGT | | | |
| | GCTACTGGCTCTCCAGGTACTTCTACTGAACCG | | | |
| | TCTGAAGGCAGCGCA | | | |
| LCW580_38 | ATGGCTAGTCCTGCTGGCTCTCCAACCTCCACT | 610 | LCW546_06 | LCW0402_041 |
| | GAGGAAGGTACTTCTACCGAACCGTCCGAGGGT | | | |
| | AGCGCACCAGGTAGCCCAGCAGGTTCTCCTACC | | | |
| | TCCACCGAGGAAGGTACTTCTACCGAACCGTCC | | | |
| | GAGGGTAGCGCACCAGGTACTTCTACTGAACCG | | | |
| | TCTGAAGGCAGCGCA | | | |
| LCW580_63 | ATGGCTAGTCCTGCTGGCTCTCCGACCTCTACT | 611 | LCW546_09 | LCW0402_020 |
| | GAGGAAGGTACTTCTACTGAACCGTCTGAAGGC | | | |
| | AGCGCACCAGGTAGCGAACCGGCTACTTCCGGT | | | |
| | TCTGAAACCCCAGGTAGCCCAGCAGGTTCTCCA | | | |
| | ACTTCTACTGAAGAAGGTACTTCTACTGAACCG | | | |
| | TCTGAAGGCAGCGCA | | | |
| LCW580_06 | ATGGCTAGTCCTGCTGGCTCTCCAACCTCCACT | 612 | LCW546_06 | LCW0404_031 |
| | GAGGAAGGTACCCCGGGTAGCGGTACTGCTTCT | | | |
| | TCCTCTCCAGGTAGCTCTACCCCTTCTGGTGCAA | | | |
| | CCGGCTCTCCAGGTGCTTCTCCGGGCACCAGCT | | | |
| | CTACCGGTTCTCCAGGTACTTCTACTGAACCGT | | | |
| | CTGAAGGCAGCGCA | | | |
| LCW580_35 | ATGGCTAGTCCTGCTGGCTCTCCGACCTCTACT | 613 | LCW546_09 | LCW0402_020 |
| | GAGGAAGGTACTTCTACTGAACCGTCTGAAGGC | | | |
| | AGCGCACCAGGTAGCGAACCGGCTACTTCCGGT | | | |
| | TCTGAAACCCCAGGTAGCCCAGCAGGTTCTCCA | | | |
| | ACTTCTACTGAAGAAGGTACTTCTACTGAACCG | | | |
| | TCTGAAGGCAGCGCA | | | |
| LCW580_67 | ATGGCTAGTCCTGCTGGCTCTCCGACCTCTACT | 614 | LCW546_09 | LCW0403_064 |
| | GAGGAAGGTACCTCCCCTAGCGGCGAATCTTCT | | | |
| | ACTGCTCCAGGTACCTCTCCTAGCGGCGAATCT | | | |
| | TCTACCGCTCCAGGTACCTCCCCTAGCGGTGAA | | | |
| | TCTTCTACCGCACCAGGTACTTCTACTGAACCG | | | |
| | TCTGAAGGCAGCGCA | | | |
| LCW580_13 | ATGGCTAGTCCTGCTGGCTCTCCGACCTCTACT | 615 | LCW546_09 | LCW0403_060 |
| | GAGGAAGGTACCTCTACTCCGGAAAGCGGTTCC | | | |
| | GCATCTCCAGGTTCTACCAGCGAATCCCCGTCT | | | |
| | GGCACCGCACCAGGTTCTACTAGCTCTACTGCT | | | |
| | GAATCTCCGGGCCCAGGTACTTCTACTGAACCG | | | |
| | TCTGAAGGCAGCGCA | | | |
| LCW580_88 | ATGGCTAGTCCTGCTGGCTCTCCGACCTCTACT | 616 | LCW546_09 | LCW0403_064 |
| | GAGGAAGGTACCTCCCCTAGCGGCGAATCTTCT | | | |
| | ACTGCTCCAGGTACCTCTCCTAGCGGCGAATCT | | | |
| | TCTACCGCTCCAGGTACCTCCCCTAGCGGTGAA | | | |
| | TCTTCTACCGCACCAGGTACTTCTACTGAACCG | | | |
| | TCTGAAGGCAGCGCA | | | |
| LCW580_11 | ATGGCTAGTCCTGCTGGCTCTCCGACCTCTACT | 617 | LCW546_09 | LCW0403_060 |
| | GAGGAAGGTACCTCTACTCCGGAAAGCGGTTCC | | | |
| | GCATCTCCAGGTTCTACCAGCGAATCCCCGTCT | | | |
| | GGCACCGCACCAGGTTCTACTAGCTCTACTGCT | | | |
| | GAATCTCCGGGCCCAGGTACTTCTACTGAACCG | | | |
| | TCTGAAGGCAGCGCA | | | |

### Example 17

### Construction of N-Terminal Extensions of XTEN—Construction and Screening of Combinatorial 12mer and 36mer Libraries for XTEN-AM875 and XTEN-AE864

[0346] This example details a step in the optimization of the N-terminus of the XTEN protein to promote the initiation of translation to allow for expression of XTEN fusions at the N-terminus of proteins without the presence of a helper domain. With preferences for the first four codons (see Examples supra, and for the best pairing of N-terminal 12mers and 36mers (see Example supra) established, a combinatorial approach was undertaken to examine the union of these preferences. This created novel 48mers at the N-terminus of the XTEN protein and enabled the testing of the confluence of previous conclusions. Additionally, the ability of these leader sequences to be a universal solution for all XTEN proteins was assessed by placing the new 48mers in front of both XTEN-AE864 and XTEN-AM875. Instead of using all 125 clones of 36mer segment, the plasmids from 6 selected clones of 36mer segment with best GFP expression in the combinatorial library were digested with NdeI/EcoRI/BsaI and the appropriate fragments were gel-purified. The plasmids from clones AC94 (CBD-XTEN_AM875-GFP) and AC104 (CBD-XTEN_AE864-GFP) were digested with digested with NdeI/EcoRI/BsaI and the appropriate fragments were gel-purified. These fragments were ligated together and transformed into E. coli BL21Gold(DE3) competent cells to obtain colonies of the libraries LCW0585 (−XTEN_AM875-GFP) and LCW0586 (−XTEN_AE864-GFP), which could also serve as the vectors for further cloning 8 selected 12mers at the very N-terminus. The plasmids of LCW0585 and LCW0586 were digested with NdeI/EcoRI/BsaI and the appropriate fragments were gel-purified. 8 pairs of oligonucleotides encoding 8 selected 12mer sequences with best GFP expression in the previous (Generation 2) screening were designed, annealed and ligated with the NdeI/EcoRI/BsaI digested LCW0585 and LCW0586 vectors, and transformed into E. coli BL21Gold(DE3) competent cells to obtain colonies of the final libraries LCW0587 (XTEN_AM923-GFP) and LCW0588 (XTEN_AE912-GFP). With a theoretical diversity of 48 unique clones, a total of 252 individual colonies from the created libraries were picked and grown overnight to saturation in 500 μl of super broth media in a 96 deep well plate. This provided sufficient coverage to understand relative library performance and sequence preferences. The saturated overnight cultures were used to inoculate new 500 μl cultures in auto-induction media in which were grown overnight at 26° C. These expression cultures were then assayed using a fluorescence plate reader (excitation 395 nm, emission 510 nm) to determine the amount of GFP reporter present. The top 36 clones were sequenced and retested for GFP reporter expression. 36 clones yielded usable sequencing data and these 36 were used for the subsequent analysis. The sequencing data determined the 12mer, the third codon, the fourth codon and the 36mer present in the clone and revealed that many of the clones were independent replicates of the same sequence. Additionally, the retest results for these clones are close in value, indicating the screening process was robust. Preferences for certain combinations at the N-terminus were seen and were consistently yielding higher fluorescence values approximately 50% greater than the benchmark controls (see Tables 19 and 20). These date support the conclusion that the inclusion of the sequences encoding the optimized N-terminal XTEN into the fusion protein genes conferred a marked enhancement on the expression of the fusion proteins.

TABLE 19
Preferred N-terminal Combinations for XTEN-AM875

| | Number of | | | | | |
|---|---|---|---|---|---|---|
| Clone Name | Replicates | 12mer | 36mer | Mean | SD | CV |
| CBD-AM875 | NA | NA | NA | 1715 | 418 | 16% |
| LCW587_08 | 7 | LCW546_06_3 = GAA | LCW404_40 | 2333 | 572 | 18% |
| LCW587_17 | 5 | LCW546_09_3 = GAA | LCW403_64 | 2172 | 293 | 10% |

TABLE 20
Preferred N-terminal Combinations for XTEN-AE864

| | Number of | | | | | |
|---|---|---|---|---|---|---|
| Clone Name | Replicates | 12mer | 36mer | Mean | SD | CV |
| AC82 | NA | NA | NA | 1979 | 679 | 24% |
| LCW588_14 | 8 | LCW546_06_opt3 | LCW404_31 | 2801 | 240 | 6% |
| LCW588_27 | 2 | LCW546_06_opt34 | LCW404_40 | 2839 | 556 | 15% |

[0347] Notably, the preferred combination of the N-terminal for the XTEN-AM875 and the preferred combination for the XTEN-AE864 are not the same (Tables 19 and 20), indicating more complex interactions further than 150 bases from the initiation site influence expression levels. The sequences for the preferred nucleotide sequences are listed in Table 21 and the preferred clones were analyzed by SDS-PAGE to independently confirm expression (see FIG. 13). The complete sequences of XTEN_AM923 and XTEN_AE912 were selected for further analysis.

TABLE 21
Preferred DNA Nucleotide Sequences for first 48 Amino Acid Residues of
N-terminal XTEN-AM875 and XTEN-AE864

| | XTEN | | |
|---|---|---|---|
| Clone Name | Modified | DNA Nucleotide Sequence | SEQ ID NO: |
| LCW587_08 | AM875 | ATGGCTGAACCTGCTGGCTCTCCAACCTCCACTGAGGAAGGTGCATC | 618 |
| | | CCCGGGCACCAGCTCTACCGGTTCTCCAGGTAGCTCTACCCCGTCTG | |
| | | GTGCTACCGGCTCTCCAGGTAGCTCTACCCCGTCTGGTGCTACTGGC | |
| | | TCTCCAGGTACTTCTACTGAACCGTCTGAAGGCAGCGCA | |
| LCW587_17 | AM875 | ATGGCTGAACCTGCTGGCTCTCCGACCTCTACTGAGGAAGGTACCTC | 619 |
| | | CCCTAGCGGCGAATCTTCTACTGCTCCAGGTACCTCTCCTAGCGGCG | |
| | | AATCTTCTACCGCTCCAGGTACCTCCCCTAGCGGTGAATCTTCTACC | |
| | | GCACCAGGTACTTCTACTGAACCGTCTGAAGGCAGCGCA | |
| LCW588_14 | AE864 | ATGGCTGAACCTGCTGGCTCTCCAACCTCCACTGAGGAAGGTACCCC | 620 |
| | | GGGTAGCGGTACTGCTTCTTCCTCTCCAGGTAGCTCTACCCCTTCTGG | |
| | | TGCAACCGGCTCTCCAGGTGCTTCTCCGGGCACCAGCTCTACCGGTT | |
| | | CTCCAGGTAGCCCGGCTGGCTCTCCTACCTCTACTGAG | |
| LCW588_27 | AE864 | ATGGCTGAAACTGCTGGCTCTCCAACCTCCACTGAGGAAGGTGCATC | 621 |
| | | CCCGGGCACCAGCTCTACCGGTTCTCCAGGTAGCTCTACCCCGTCTG | |
| | | GTGCTACCGGCTCTCCAGGTAGCTCTACCCCGTCTGGTGCTACTGGC | |
| | | TCTCCAGGTAGCCCGGCTGGCTCTCCTACCTCTACTGAG | |

### Example 18

### Methods of Producing and Evaluating GHXTEN; XTEN-hGH as Example

[0348] A general schema for producing and evaluating GHXTEN compositions is presented in FIG. 6, and forms the basis for the general description of this Example. Using the disclosed methods and those known to one of ordinary skill in the art, together with guidance provided in the illustrative examples, a skilled artesian can create and evaluate a range of GHXTEN fusion proteins comprising, XTENs, GH and variants of GH known in the art. The Example is, therefore, to be construed as merely illustrative, and not limitative of the methods in any way whatsoever; numerous variations will be apparent to the ordinarily skilled artisan. In this Example, a GHXTEN of human growth hormone linked to an XTEN of the AE family of motifs would be created.

[0349] The general scheme for producing polynucleotides encoding XTEN is presented in FIGS. 4 and 5. FIG. 5 is a schematic flowchart of representative steps in the assembly of a XTEN polynucleotide construct in one of the embodiments of the invention. Individual oligonucleotides 501 are annealed into sequence motifs 502 such as a 12 amino acid motif (“12-mer”), which is subsequently ligated with an oligo containing BbsI, and KpnI restriction sites 503. The motif libraries can be limited to specific sequence XTEN families; e.g., AD, AE, AF, AG, AM, or AQ sequences of Table 1. In this case, the motifs of the AE family would be used as the motif library, which are annealed to the 12-mer to create a “building block” length; e.g., a segment that encodes 36 amino acids. The gene encoding the XTEN sequence can be assembled by ligation and multimerization of the “building blocks” until the desired length of the XTEN gene 504 is achieved. As illustrated in FIG. 5, the XTEN length in this case is 48 amino acid residues, but longer lengths can be achieved by this process. For example, multimerization can be performed by ligation, overlap extension, PCR assembly or similar cloning techniques known in the art. The XTEN gene can be cloned into a stuffer vector. In the example illustrated in FIG. 5, the vector can encode a Flag sequence 506 followed by a stuffer sequence that is flanked by BsaI, BbsI, and KpnI sites 507 and a GH gene (e.g., hGH) 508, resulting in the gene encoding the GHXTEN 500, which, in this case encodes the fusion protein in the configuration, N- to C-terminus, XTEN-hGH.

[0350] DNA sequences encoding GH can be conveniently obtained by standard procedures known in the art from a cDNA library prepared from an appropriate cellular source, from a genomic library, or may be created synthetically (e.g., automated nucleic acid synthesis) using DNA sequences obtained from publicly available databases, patents, or literature references. A gene or polynucleotide encoding the GH portion of the protein can be then be cloned into a construct, such as those described herein, which can be a plasmid or other vector under control of appropriate transcription and translation sequences for high level protein expression in a biological system. A second gene or polynucleotide coding for the XTEN portion (in the case of FIG. 5 illustrated as an AE with 48 amino acid residues) can be genetically fused to the nucleotides encoding the N-terminus of the hGH gene by cloning it into the construct adjacent and in frame with the gene coding for the hGH, through a ligation or multimerization step. In this manner, a chimeric DNA molecule coding for (or complementary to) the XTEN-hGH GHXTEN fusion protein would be generated within the construct. Optionally, a gene encoding for a second XTEN could be inserted and ligated in-frame to the nucleotides encoding the C-terminus of the XTEN-hGH gene, resulting in a construct encoding an XTEN-hGH-XTEN fusion protein. The construct can be designed in different configurations to encode the various permutations of the fusion partners as a monomeric polypeptide. For example, the gene can be created to encode the fusion protein in the order (N- to C-terminus): hGH-XTEN; XTEN-hGH; hGH-XTEN-hGH; XTEN-hGH-XTEN; as well as multimers of the foregoing. Optionally, this chimeric DNA molecule may be transferred or cloned into another construct that is a more appropriate expression vector. At this point, a host cell capable of expressing the chimeric DNA molecule would be transformed with the chimeric DNA molecule. The vectors containing the DNA segments of interest can be transferred into an appropriate host cell by well-known methods, depending on the type of cellular host, as described supra.

[0351] Host cells containing the XTEN-GH expression vector would be cultured in conventional nutrient media modified as appropriate for activating the promoter. The culture conditions, such as temperature, pH and the like, are those previously used with the host cell selected for expression, and will be apparent to the ordinarily skilled artisan. After expression of the fusion protein, cells would be harvested by centrifugation, disrupted by physical or chemical means, and the resulting crude extract retained for purification of the fusion protein, as described below. For GHXTEN compositions secreted by the host cells, supernatant from centrifugation would be separated and retained for further purification.

[0352] Gene expression would be measured in a sample directly, for example, by conventional Southern blotting, Northern blotting to quantitate the transcription of mRNA [Thomas, Proc. Natl. Acad. Sci. USA, 77:5201-5205 (1980)], dot blotting (DNA analysis), or in situ hybridization, using an appropriately labeled probe, based on the sequences provided herein. Alternatively, gene expression would be measured by immunological of fluorescent methods, such as immunohistochemical staining of cells to quantitate directly the expression of gene product. Antibodies useful for immunohistochemical staining and/or assay of sample fluids may be either monoclonal or polyclonal, and may be prepared in any mammal Conveniently, the antibodies may be prepared against the hGH sequence polypeptide using a synthetic peptide based on the sequences provided herein or against exogenous sequence fused to hGH and encoding a specific antibody epitope. Examples of selectable markers are well known to one of skill in the art and include reporters such as enhanced green fluorescent protein (EGFP), beta-galactosidase ((β-gal) or chloramphenicol acetyltransferase (CAT).

[0353] The XTEN-hGH polypeptide product would be purified via methods known in the art. Procedures such as gel filtration, affinity purification, salt fractionation, ion exchange chromatography, size exclusion chromatography, hydroxyapatite adsorption chromatography, hydrophobic interaction chromatography or gel electrophoresis are all techniques that may be used in the purification. Specific methods of purification are described in Robert K. Scopes, Protein Purification: Principles and Practice, Charles R. Castor, ed., Springer-Verlag 1994, and Sambrook, et al., supra. Multi-step purification separations are also described in Baron, et al., Crit. Rev. Biotechnol. 10:179-90 (1990) and Below, et al., J. Chromatogr. A. 679:67-83 (1994).

[0354] As illustrated in FIG. 6, the isolated XTEN-hGH fusion proteins would then be characterized for their chemical and activity properties. Isolated fusion protein would be characterized, e.g., for sequence, purity, apparent molecular weight, solubility and stability using standard methods known in the art. The fusion protein meeting expected standards would then be evaluated for activity, which can be measured in vitro or in vivo by measuring one of the growth hormone-associated parameters described herein, using one or more assays disclosed herein, or using the assays of the Examples or Table 34.

[0355] In addition, the XTEN-hGH fusion protein would be administered to one or more animal species to determine standard pharmacokinetic parameters, as described in Examples 30-32.

[0356] By the iterative process of producing, expressing, and recovering XTEN-hGH constructs, followed by their characterization using methods disclosed herein or others known in the art, the GHXTEN compositions comprising hGH and an XTEN can be produced and evaluated by one of ordinary skill in the art to confirm the expected properties such as enhanced solubility, enhanced stability, improved pharmacokinetics and reduced immunogenicity, leading to an overall enhanced therapeutic activity compared to the corresponding unfused hGH. For those fusion proteins not possessing the desired properties, a different sequence can be constructed, expressed, isolated and evaluated by these methods in order to obtain a composition with such properties.

### Example 19

### Construction of Genes and Vectors of hGH Linked to K and Y XTEN Sequences

[0357] K Series GHXTEN Constructs

[0358] A pET-series vector was constructed with T7 promoter, which expresses a protein containing cellulose binding domain (CBD) at the N-terminus, followed by a Tomato Etch Virus (TEV) protease cleavage site, followed by the hGH coding sequence, and by the K288 coding sequence: CBD-K288-hGH. The K288 has the repetitive sequence (GEGGGEGGE) ₃₂ (SEQ ID NO: 622). The CBD sequence used is shown in Swissprot file Q06851 and the purification of CBD fusion proteins is described in Ofir, K. et al. (2005) Proteomics 5:1806. The sequence of the TEV cleavage site is ENLYFQ/X (SEQ ID NO: 623); G was used in the X position. This construct was transformed into BL21(DE3)-star E.coli strain and grown under conditions promoting expression. Cells were collected and disrupted. The cellular supernatant was applied on beaded cellulose resin (Perloza 100), washed with buffer A (25 mM Tris pH=8.0) and eluted from the column with 20 mM NaOH. pH was adjusted by titrating the sample with 1M Tris buffer pH=8.0. Protein purity was estimated to be above 90%. The eluted protein was digested with purified TEV protease overnight at 4° C., and the digested sample was applied to a beaded cellulose resin (Perloza 100). The CBD was retained on the column, and the K288-hGH was found in the column flow-through. The pooled flow-through was loaded on the anion-exchange (Q-sepharose, Pharmacia), washed with buffer A (25 mM Tris pH=8.0) and eluted from the column using a shallow linear gradient of same buffer with 1M NaCl. The eluted fusion protein was pooled, dialyzed against buffer A, concentrated, and purified by size-exclusion chromatography (SEC) as the final purification. Protein purity was estimated to be above 98%. The final protein is K288-hGH. SDS PAGE analyses of samples throughout the purification process are shown in FIG. 20.

[0359] Y Series GHXTEN Contructs

[0360] The gene encoding hGH was amplified by polymerase chain reaction (PCR), which introduced BbsI and HindIII restriction sites that are compatible with the BbsI and HindIII sites that flank the stuffer in the XTEN destination vector. The pCBD-XTEN plasmid is a pET30 derivative from Novagen in the format of Cellulose Binding Domain (CBD)-XTEN-Stuffer, where Stuffer is green fluorescent protein (GFP) and XTEN can be any length from 36 to 576 or greater. Constructs were generated by replacing a stuffer sequence in pCBD-XTEN with the hGH-encoding fragment (FIG. 7B). The pCBD-XTEN features a T7 promoter upstream of CBD followed by an XTEN sequence fused in-frame upstream of the stuffer sequence. The XTEN sequences employed belong to family XTEN_Y and encode lengths that include 36, 72, 144, 288, and 576 amino acids. The stuffer fragment was removed by restriction digest using BbsI and HindIII endonucleases. Restriction digested hGH DNA fragment was ligated into the cleaved pCBD-XTEN vector using T4 DNA ligase and electroporated into BL21(DE3) Gold (Stratagene). Transformants were screened by DNA miniprep and the desired construct was confirmed by DNA sequencing. The final vector yields the CBD_XTEN_hGH gene under the control of a T7 promoter. The resulting DNA sequences encoded for GH linked to XTEN of lengths of 36, 72, 144, and 288 amino acids, respectively.

### Example 20

### Construction of hGH-XTEN Genes and Vectors using AE and AM XTEN Sequences

[0361] The gene encoding hGH was amplified by polymerase chain reaction (PCR), which introduced NdeI and BbsI restriction sites that are compatible with the NdeI and BsaI sites that flank the stuffer in the XTEN destination vector. The pXTEN plasmid is a pET30 derivative from Novagen in the format of Stuffer-XTEN, where Stuffer can be either green fluorescent protein (GFP) or CBD and XTEN can be any length from 36 to 1318 amino acids or greater (FIG. 7). Constructs were generated by replacing a stuffer sequence in pXTEN with the hGH-encoding fragment. The pXTEN features a T7 promoter upstream of the stuffer sequence, and an XTEN sequence fused in-frame downstream of the stuffer sequence. The XTEN sequences employed belong to the AE or AM family of XTEN and encode lengths that include 36, 72, 144, 288, 576, 864, 875 and 1318 amino acids. The stuffer fragment was removed by restriction digest using NdeI and BsaI endonucleases. Restriction digested hGH DNA fragment was ligated into the cleaved pXTEN vector using T4 DNA ligase and electroporated into BL21(DE3) Gold (Stratagene). Transformants were screened by DNA miniprep and the desired constructs were confirmed by DNA sequencing. The final vector yields the hGH-XTEN gene under the control of a T7 promoter, and would be used to express a fusion protein with hGH at the N-terminus.

### Example 21

### Construction of XTEN-hGH and XTEN-hGH Genes and Vectors using AE and AM XTEN Sequences

[0362] The gene encoding hGH was amplified by polymerase chain reaction (PCR), which introduced BbsI and HindIII restriction sites that are compatible with the BbsI and HindIII sites that flank the stuffer in the XTEN destination vector. The pCBD-XTEN plasmid is a pET30 derivative from Novagen in the format of Cellulose Binding Domain (CBD)-XTEN-Stuffer, where Stuffer is green fluorescent protein (GFP) and XTEN can be any length from 36 to 1318 or greater (FIG. 7). Constructs were generated by replacing a stuffer sequence in pCBD-XTEN with the hGH-encoding fragment. The pCBD-XTEN features a T7 promoter upstream of CBD followed by an XTEN sequence fused in-frame upstream of the stuffer sequence. The XTEN sequences employed belong to family XTEN_AE and XTEN_AM and encode lengths that include 36, 72, 144, 288, 576, 864, 875 and 1318 amino acids. The stuffer fragment was removed by restriction digest using BbsI and HindIII endonucleases. Restriction digested hGH DNA fragment was ligated into the cleaved pCBD-XTEN vector using T4 DNA ligase and electroporated into BL21(DE3) Gold (Stratagene). Transformants were screened by DNA miniprep and the desired construct was confirmed by DNA sequencing. The final vector yields the CBD_XTEN_hGH gene under the control of a T7 promoter, and would be used to express a fusion protein with hGH at the C-terminus.

### Example 22

### Construction of XTEN-AE_hGH_XTEN-AE Genes and Vectors

[0363] The gene encoding hGH was amplified by polymerase chain reaction (PCR), which introduced BsaI and HindIII restriction sites that are compatible with the BbsI and HindIII sites that flank the stuffer in the pNTS-XTEN destination vector. The pNTS-XTEN_AE plasmid is a pET30 derivative from Novagen in the format of N-terminal XTEN expression sequence of 48 amino acids-XTEN-Stuffer, where Stuffer is green fluorescent protein (GFP) and XTEN can be any length from 36 to 576 or greater. Constructs were generated by replacing a stuffer sequence in pNTS-XTEN with the hGH-encoding fragment. The pNTS-XTEN features a T7 promoter upstream of NTS followed by an XTEN sequence fused in-frame upstream of the stuffer sequence. The XTEN sequences employed belong to family XTEN_AE and encode lengths that can include 36, 72, 144, 288, 576, 864, and 1296 amino acids. The stuffer fragment was removed by restriction digest using BbsI and HindIII endonucleases. Restriction digested hGH DNA fragment was ligated into the cleaved pNTS-XTEN vector using T4 DNA ligase and electroporated into BL21(DE3) Gold (Stratagene). In some cases, a second XTEN_AE sequence of 144 or 288 amino acids was ligated to the C-terminus of the hGH encoding gene, the steps of which are illustrated in FIG. 8. The gene encoding hGH was amplified by polymerase chain reaction (PCR), which introduced BsaI and HindIII (with additional BbsI in front of HindIII) restriction sites that are compatible with the BbsI and HindIII sites that flank the stuffer in the pNTS-XTEN destination vector. After restriction enzyme digestions, ligation and transformation, the resulting intermediate plasmid has the format of pNTS-XTEN-hGH with the BbsI/HindIII restriction sites at the C-terminus of hGH. The intermediate plasmid was further digested with BbsI and HindIII, ligated with the second XTEN_AE sequence of 144 or 288 amino acids flanked by BsaI and HindIII, placing the AE144 or the AE288 encoding sequenes at the C-terminus of the XTEN-hGH gene, and transformed into BL21(DE3)Gold. Transformants were screened by DNA miniprep and the desired construct was confirmed by DNA sequencing. The final vectors, described above, yield the genes in configurations of either NTS_XTEN_hGH or NTS_XTEN_hGH_XTEN, under the control of a T7 promoter, as shown in FIGS. 7C and 7D.

### Example 23

### Purification of GHXTEN_AE Constructs

[0364] Protein Expression

[0365] The plasmids described above were transformed into BL21(DE3)-Gold E. coli strain (Novagen) and plated on an LB-agar plate with the appropriate antibiotics and grown overnight at 37° C. A single colony was inoculated into 5 ml of TB125 medium and grown overnight at 37° C. The next day the inoculum was transformed into a 2 L vessel with 500 ml of TB125, and grown until an OD=0.6 was reached, followed by continued growth at 26° C. for 16 hr with 0.1 mM IPTG.

[0366] Cells were collected by centrifugation and the cell pellet was resuspended in 50 ml Buffer containing 5 mM Tris pH 8.0, 100 mM NaCl. Cells were disrupted using an APV-2000 homogenizer. The pH of the lysate was then adjusted to pH 4.5 with acetic acid to precipitate contaminating host cell proteins and was subsequently clarified by centrifugation. The clarified, acid-treated lysate was then applied to a DE52 Anion exchange chromatography column and eluted with NaCl. The eluted fraction was then further acidified to pH 4.2 and applied to a MacroCapSP cation exchange chromatography column Product was eluted using sequential elution with NaCl. An additional chromatography step employing Macrocap Q was implemented to remove product-related aggregates and residual host cell impurities (e.g. endotoxin, DNA, host cell protein).

[0367] Protein purity was estimated to be above 98%. The quantity of eluted fusion protein was determined by SDS-PAGE analysis and by measurement of total protein concentration. The high quantity of eluted GHXTEN fusion protein reflects the higher degree of solubility of the fusion protein relative to hGH not linked to XTEN (see, e.g., Singh, S. M., et al. (2005) J Biosci Bioeng, 99: 303; Patra, A. K., et al. (2000) Protein Expr Purif. 18: 182), as well as the ability to remain soluble at acidified conditions that result in the precipitation of host cell protein.

[0368] Final Formulation and Storage

[0369] The buffer exchanged proteins were then concentrated using 10K MWCO Vivacell 100 centrifugal ultrafiltration unit to not less than 15 mg/ml. The concentrate was sterile filtered using a 0.22 um syringe filter. The final solution was aliquoted and stored at −80° C.

### Example 24

### Characterization of GHXTEN Constructs

[0370] SDS-PAGE Analysis

[0371] 5 μg of final purified GHXTEN proteins of GH linked to Y576 (either N- or C-terminus of Y576) was subjected to both non-reducing and reducing SDS-PAGE using NuPAGE 4-12% Bis-Tris gel from Invitrogen according to manufacturer's specifications. The resulting gel is shown in FIG. 20.

[0372] Analytical Size Exclusion Chromatography

[0373] Size exclusion chromatography analysis was performed using a TSKGel-G4000 SWXL (7.8 mm×30 cm) column. 20 ug of the purified protein at a concentration of 1 mg/ml was separated at a flowrate of 0.6 ml/min in 20 mM phosphate pH 6.8, 114 mM NaCl. Chromatogram profiles were monitored using OD214 nm and OD280 nm. Column calibration was performed using a size exclusion calibration standard from BioRad, the markers include thyroglobulin (670 kDa), bovine gamma-globulin (158 kDa), chicken ovalbumin (44 kDa), equine myoglobuin (17 kDa) and vitamin B12 (1.35 kDa). The chromatographic profiles of Y576-GH were generated and demonstrate that the apparent molecular weight of each construct is significantly larger than that expected for a globular protein, in comparison to the standard proteins run in the same assay (data not shown).

[0374] Analytical RP-HPLC

[0375] Analytical RP-HPLC chromatography analysis was performed using a C4 (7.8 mm×20 cm) column. The column was equilibrated with 100% AcetonNitrile plus 0.1% TFA in the mobile phase at a flowrate of 1 ml/min. Twenty micro gram of the purified protein, with and without denaturing, at a concentration of 0.2 mg/ml was injected separately. The protein was separated and eluted by liner gradient within 15 min from 5% to 60% of buffer containing HPLC grade H20 plus 0.1% TFA. Chromatogram profiles were monitored using OD214 nm and OD280 nm. The chromatographic profiles of native and denatured Y576-GH are shown as an overlay in FIG. 21.

### Example 25

### ELISA-Based Binding Assays

[0376] XTEN fusions to GH were tested in a standard ELISA-based assay to evaluate their ability to bind to GH Receptor. Assays were performed using a sandwich ELISA format in which a recombinant hGH receptor (hGHR-Fc) is coated onto wells of an ELISA plate. The wells were then blocked, washed, and GHXTEN samples are then incubated in the wells at varying dilutions to allow capture of the GHXTEN. Wells were washed extensively, and bound protein was detected using a biotinylated preparation of a polyclonal or monoclonal anti-GH or anti-XTEN antibody and streptavidin HRP. The fraction of bound protein can be calculated by comparing the colorimetric response at each serum dilution to a standard curve of unmodified GH. In a first assay comparing hGH bound to K288 compared to recombinant hGH, the results, show in FIG. 15, demonstrate the ability of GHXTEN to bind to the hGH receptor. In a second assay, two configurations of GHXTEN; AM864-hGH and hGH-AM864; compared to recombinant hGH. The results, shown in FIG. 16, indicate apparent EC50 values for native hGH of 0.0701 nM, AM864-hGH of 0.3905, and hGH-AM864 of 2.733. In a third assay, recombinant hGH was compared to AE912-hGH-AE144 in order to show the ability to reduce binding affinity by the addition of a C-terminal XTEN to the hGH component of an GHXTEN fusion protein, and the results (FIG. 18) demonstrate a decrease in binding affinity of approximately 17-fold compared to hGH.

### Example 26

### Effect of Heat Treatment on the Stability of hGH and GHXTEN

[0377] The ability of XTEN to confer structural stability on the attached therapeutic molecule was investigated. Samples of hGH and AM864-hGH were incubated at 25° C. and 80° C., and then analyzed by gel electrophoresis and Coomassie staining FIG. 17A is an SDS-PAGE gel of the two preparations treated at 25° C. and 80° C. for 15 minutes, while FIG. 17B shows the corresponding percentage of receptor binding activity of the 80° C. sample relative to the 25° C. treatment. The results indicate that hGH denatures under the treatment conditions while the GHXTEN construct remains largely stable under the experimental conditions, retaining nearly 80% of its receptor binding activity.

[0378] Conclusions: The XTEN component of the GHXTEN fusion protein confers enhanced solubility and stability properties to the fusion protein in comparison to hGH not linked to XTEN.

### Example 27

### Comparative Effects of hGH and AM864-hGH on Secretion of IGF-1

[0379] The ability of a GHXTEN to retain pharmacologic potency was assessed using the measured parameter of circulating IGF-1 in response to administered compound. FIG. 24 shows the effects of daily administration of hGH (0.071 mg/kg daily) or a single dose of AM864-hGH (5 mg/kg; equivalent to 1.1 mg/kg) on circulating IGF-1 levels in cynomolgus monkeys (n=4/group), depicted as percentage change compared to baseline. The results show enhanced activity by the GHXTEN construct, despite being dosed only once at the beginning of the experiment.

### Example 28

### Comparative Effects of hGH and AM864-hGH on Body Weight Gain

[0380] The ability of a GHXTEN to retain pharmacologic potency was assessed using the measured parameter of body weight gain in a hypox rat in response to administered compound. FIG. 25 shows the effects of administration of hGH or AM864-hGH at the indicated doses and dose frequency on body weight in hypox rats. The results show retention of biologic activity by the GHXTEN constructs that is equivalent in potency to comparable dosage of hGH, yet with less frequent dosing. Increased dosage of AM864-hGH led to increases in body weight gains showing enhancement of the pharmacodynamic properties of the GHXTEN compared to hGH under these conditions.

### Example 29

### Comparative Effects of hGH and AM864-hGH on Bone Cartilage

[0381] The ability of a GHXTEN to retain pharmacologic potency was assessed using the measured parameter of increase in tibial epiphyseal plate width in hypox rats. FIG. 26 shows the comparative effects of administration of placebo, hGH, and AM864-hGH, shown in histologic cross-sections of the tibia from rats after 9 days of treatment, with the margins denoted with dotted lines. Groups are the same as shown in FIG. 26. FIG. 26A shows that the placebo group had an average cross-section width of 344±38.6 μm of the plate after 9 days. FIG. 26B shows that the hGH group (10 μg daily) had an average cross-section width of 598±8.5 μm after 9 days. FIG. 26C shows that the AM864-hGH (15 mg/kg q3d) had an average cross-section width of 944±8.5 μm after 9 days. The results show enhanced activity by the GHXTEN construct compared to hGH, despite being dosed at less frequent intervals.

### Example 30

### PK Analysis of GHXTEN Protein Fusions

[0382] GH-Y576 and Y576h-GH (in this case indicating the N- to C-terminus order of GH and XTEN) were injected into cynomolgus monkeys in order to determine in vivo pharmacokinetic parameters. The compositions were provided in an aqueous buffer and were administered by intravenous routes into separate animals at 0.15 mg/kg dosing. Serum samples were collected at various time points following administration and analyzed for serum concentrations of the accessory proteins. Analysis was performed using a sandwich ELISA format. Rabbit polyclonal anti-XTEN (to Y-type XTEN) antibodies were coated onto wells of an ELISA plate. Serum samples were then incubated in the wells at varying dilutions to allow capture of the compound by the coated antibodies. Wells were washed extensively, and bound protein was detected using a biotinylated preparation of the polyclonal anti-XTEN antibody and streptavidin HRP. Serum protein concentrations were calculated at each time point by comparing the colorimetric response at each serum dilution to a standard curve. Pharmacokinetic parameters were calculated using the WinNonLin software package.

[0383] FIG. 22 shows the concentration profile of the two GH constructs following intravenous administration to cynomolgus monkeys. Following IV administration, the half-life was calculated to be 7 hours for hGH-Y576 and 10.5 hours for Y576-hGH. For reference, the published half-life of unmodified GH is well described in the literature as 10-15 minutes in adult humans (see, e.g., Hindmarch, P. C., et al., Clinical Endocrinology (2008) 30(4): 443-450). The results show that the orientation (N- versus C-terminal) of hGH relative to the XTEN did not affect the clearance of the fusion proteins, and that addition of the Y576 greatly extended the terminal half-life of the fusion protein.

[0384] Another pharmacokinetic study in cynomolgus monkeys was performed using the AM864-hGH construct. FIG. 23 shows the pharmacokinetic profile after a single dose of 5 mg/kg AM864-hGH administered subcutaneously to cynomolgus monkeys, with the derived equivalent hGH concentration shown (dashed line).

[0385] Conclusions: The XTEN component of the GHXTEN fusion protein confers enhanced pharmacokinetic properties to the fusion protein in comparison to hGH not linked to XTEN, under these conditions.

### Example 31

### PK Analysis of hGH XTEN Fusion Polypeptides in Rats

[0386] The GHXTEN fusion proteins AE912-hGH, AM864-hGH (synonym to AM875-hGH for this and following Examples), AE912-hGH-AE144 and AE912-hGH-AE288 were evaluated in rats in order to determine in vivo pharmacokinetic parameters of the hGHXTEN polypeptides. All compositions were provided in an aqueous buffer and were administered by subcutaneous (SC) route into separate animals using 1.5 mg/kg single doses. Plasma samples were collected at various time points following administration and analyzed for concentrations of the test articles. Analysis was performed using a sandwich ELISA format. Recombinant hGHR-Fc was coated onto wells of an ELISA plate. The wells were blocked, washed and plasma samples were then incubated in the wells at varying dilutions to allow capture of the compound by the coated antibodies. Wells were washed extensively, and bound protein was detected using a biotinylated preparation of the polyclonal anti hGH antibody and streptavidin HRP. Concentrations of test article were calculated at each time point by comparing the colorimetric response at each serum dilution to a standard curve. Pharmacokinetic parameters were calculated using the WinNonLin software package.

[0387] FIG. 27 shows the concentration profiles of the four hGH XTEN constructs after subcutaneous administration. The calculated terminal half-life for AE912-hGH was 7.5 h, 6.8 h for AM864-hGH (synonym for AM875-hGH), 12.4 h for AE912-hGH-AE144 and 13.1 h for AE912-hGH-AE288. For comparison, unmodified hGH was run in parallel in the same experiment and showed a dramatically shorter plasma half-life.

[0388] Conclusions: The incorporation of different XTEN sequences into fusion proteins comprising hGH results in significant enhancement of pharmacokinetic parameters for all four compositions compared to unmodified hGH, as demonstrated in the rodent model under these conditions. The addition of a second XTEN protein to the C-terminus of the AE-hGH constructs results in a further enhancement of the terminal half-life compared to the constructs with a single XTEN; likely due to reduced receptor mediated clearance.

### Example 32

### PK Analysis of hGH XTEN Fusion Polypeptides in Cynomolgus Monkeys

[0389] GHXTEN fusion proteins containing one or two XTEN molecules (AE912-hGH, AM864-hGH, and AE912-hGH-AE144) were evaluated in cynomolgus monkeys in order to determine the effect of the inclusion of a second XTEN on in vivo pharmacokinetic parameters of the hGHXTEN polypeptides. All compositions were provided in an aqueous buffer and were administered by subcutaneous (SC) route into separate animals using 1.5 mg/kg single doses. Plasma samples were collected at various time points following administration and analyzed for concentrations of the test articles. Analysis was performed using a sandwich ELISA format. Recombinant hGHR-Fc was coated onto wells of an ELISA plate. The wells were blocked, washed and plasma samples were then incubated in the wells at varying dilutions to allow capture of the compound by the coated antibodies. Wells were washed extensively, and bound protein was detected using a biotinylated preparation of the polyclonal anti hGH antibody and streptavidin HRP. Concentrations of test article were calculated at each time point by comparing the colorimetric response at each serum dilution to a standard curve. Pharmacokinetic parameters were calculated using the WinNonLin software package, and FIG. 28 shows the concentration profiles of the three hGH XTEN constructs after subcutaneous administration over the 336 h period. The average terminal half-life for the fusion proteins were 33 h for AM864-hGH, 44 h for AE912-hGH, and 110 h for the AE912-hGH-AE144 (containing two XTEN linked to the N- and C-termini of hGH).

[0390] Conclusions: The incorporation of different XTEN sequences into fusion proteins comprising hGH resulted in significant enhancement of pharmacokinetic parameters for all three compositions, as demonstrated in the cyno model under these conditions, with the construct containing a second XTEN linked to the C-terminus of the hGH showing a greater than about two-fold enhancement of the terminal half-life compared to the GHXTEN with a single XTEN at the N-terminus.

### Example 33

### Assessment of Pharmacodynamic Effects of AE912-hGH-AE144 GHXTEN by Measurement of IGF-1 Response in Cynomolgus Monkeys

[0391] AE912-hGH-AE144 was administered to male and female cynos SC at 0.3, 1.5, and 7.5 mg/kg and dose volumes ranging from 0.80 to 1.13 ml. Blood samples (1.0 mL) were collected into prechilled heparinized tubes at predose, 2, 4, 8, 24, 48, 72, 96, 120, 168, 216, 264, 336, 388, 432, 504 hour timepoints (16), and processed into plasma. PK was measured by ELISA assay using the anti-XTEN capture antibody and the biotinylated anti-hGH detection antibody. IGF-1 samples were sent to and analyzed by Millipore. PK parameters were calculated by analysis using the WinNonLin software package and are shown in the table below. Plasma concentration profiles of the three doses of GHXTEN and IGF-1 levels are shown in FIG. 29 and FIG. 30, respectively (open circles=0.3 mg/kg; squares=1.5 mg/kg; triangles=7.5 mg/kg). The results show that administration of AE912-hGH-AE144 results in a sustained increase in IGF-1 levels, consistent with both the biological mode of action of growth hormone and the long plasma half-life of AE912-hGH-AE144.

TABLE 22
PK parameters in cynomolgus monkeys

| | 0.3 mg/kg | 1.5 mg/kg | 7.5 mg/kg |
|---|---|---|---|
| Route | SC | SC | SC |
| T ½ (hrs) | 84.4 | 97.5 | 101.1 |
| Cmax (nM) | 41 | 910 | 340 |
| AUC (nM*hr) | 5,170 | 162,000 | 64,100 |

### Example 34

### Comparative Bioavailability of AE912-hGH-AE144 via Subcutaneous and Intramuscular Administration to Cynomolgus Monkeys

[0392] AE912-hGH-AE144 was administered to male and female cynos SC at 1.5 mg/kg via intravenous, subcutaneous, and intramuscular routes. Blood samples (1.0 mL) were collected into prechilled heparinized tubes at predose, 2, 4, 8, 24, 48, 72, 96, 120, 168, 216, 264, 336, 388, 432, 504 hour timepoints (16), and processed into plasma. Plasma levels at each time point were measured by ELISA assay using the anti-XTEN capture antibody and the biotinylated anti-hGH detection antibody. PK and bioavailability parameters were calculated by analysis using the WinNonLin software package and are shown in the table below. Plasma concentration profiles are shown in FIG. 31 (open circles=subcutaneous; triangle=IV; squares=intramuscular). For bioavailability calculations, the AUC for intravenous administration was defined to be 100%. The results show that AE912-hGH-AE144 shows a high bioavailability and distributes rapidly from the injection site to the blood compartment following injection.

TABLE 23
PK parameters in cynomolgus monkeys

| | 1.5 mg/kg | 1.5 mg/kg | 1.5 mg/kg |
|---|---|---|---|
| Route | SC | IV | IM |
| T ½ (hrs) | 97.5 | 107.7 | 102.2 |
| Cmax (nM) | 910 | 462 | 245 |
| AUC (nM*hr) | 162,000 | 60,300 | 43,200 |
| Bioavailability | ~100% | 100% | 72% |

### Example 35

### Determination of the Therapeutic Window for AE912-hGH-AE144

[0393] The specific activity of the GHXTEN AE912-hGH-AE144 was assessed using the measured parameter of body weight gain in a hypophysectomized (hypox) rat in response to administered compound. FIG. 32 shows the effects of administration of vehicle (open circles), recombinant hGH dosed at 5 nmol/kg/day (closed circles), the GHXTEN AE912-hGH-AE144 at varying doses and dose frequency (closed triangles=0.5 nmol/kg/day; open triangles=1.5 nmol/day; squares=3 nmol/kg/Q2D) on body weight in hypox rats. The results show that a dose of the GHXTEN AE912-hGH-AE144 as low as 1.5 nmol/kg/day yields comparable growth to hGH alone. However, a lower dose of 0.5 nmol/kg/day does not promote growth in these animals. Based on the pharmacokinetic profiles determined in the rats, a model for plasma levels following repeat dosing was constructed as shown in FIG. 33 (same groups as per FIG. 32). The model clearly differentiates the efficacious doses from the non-efficacious lower dose. The results show that plasma concentration of AE912-hGH-AE144 generally should remain above about 1 nmol/L concentration in order to maintain optimal growth in the hypophysectomized rat model.

### Example 36

### Human Clinical Trial Designs for Evaluating GHXTEN

[0394] Clinical trials can be designed such that the efficacy and advantages of the GHXTEN compositions, relative to the corresponding growth hormone biologics, can be verified in humans. For example, the GHXTEN fusion constructs comprising growth, as described in the Examples above, can be used in clinical trials for characterizing the efficacy of the compositions. The trials can be conducted in one or more growth hormone-related diseases, disorders, or conditions that are improved, ameliorated, or inhibited by the administration of growth hormone. Such studies in adult patients comprise three phases. First, a Phase I safety and pharmacokinetics study in adult patients is conducted to determine the maximum tolerated dose and pharmacokinetics and pharmacodynamics in humans (either normal subjects or patients with a growth disease or condition), as well as to define potential toxicities and adverse events to be tracked in future studies. The study is conducted in which single rising doses of compositions of fusion proteins of GHXTEN is administered and biochemical, PK, and clinical parameters is measured. This permits the determination of the maximum tolerated dose and establishes the threshold and maximum concentrations in dosage and circulating drug that constitute the therapeutic window for the respective components. Thereafter, clinical trials are conducted in patients with the disease, disorder or condition.

[0395] Phase II and III Clinical Trials

[0396] A phase II dosing study is conducted in patients where blood growth hormone pharmacodynamics and other physiologic, PK, safety and clinical parameters (such as listed below) appropriate for trials, such as for reversal of short stature due to GH deficiency in pediatric patients, treatment of Turner syndrome, chronic renal failure, Prader-Willi syndrome, intrauterine growth retardation, or improvements in body mass composition (increase in lean body mass, decrease in fat mass) in adult patients (such as HIV+ or acquired pituitary tumor patients). Parameters and clinical endpoints are measured as a function of the dosing of the fusion proteins compositions, yielding dose-ranging information on doses that would be appropriate for a subsequent Phase III trial, in addition to collecting safety data related to adverse events. The PK parameters are correlated to the physiologic, clinical and safety parameter data to establish the therapeutic window and the therapeutic dose regimen for the GHXTEN composition, permitting the clinician to establish the approrpirate dose ranges for a GHXTEN composition. Finally, a phase III efficacy study is conducted wherein patients would be administered the GHXTEN composition at the dose regimen, and a positive control (such as a commercially-available, approved growth hormone), or a placebo is administered daily or using other dosing schedule deemed appropriate given the pharmacokinetic and pharmacodynamic properties of the control composition, with all agents administered for an appropriately extended period of time to achieve the study endpoints. Parameters that are monitored include GH, IGF-1 and IGFBP3 concentrations, changes in height velocity, lean body mass, total body fat, trunk fat, parameters associated with insulin resistance syndrome, measurement of division and multiplication rates of chondrocytes, and/or changes in bone density and/or bone growth; parameters that would be tracked relative to the placebo or positive control groups. Efficacy outcomes would be determined using standard statistical methods. Toxicity and adverse event markers are also be followed in this study to verify that the compound is safe when used in the manner described.

### Example 37

### Analytical Size Exclusion Chromatography of XTEN Fusion Proteins with Diverse Payloads

[0397] Size exclusion chromatography analyses were performed on fusion proteins containing various therapeutic proteins and unstructured recombinant proteins of increasing length. An exemplary assay used a TSKGel-G4000 SWXL (7.8 mm×30 cm) column in which 40 μg of purified glucagon fusion protein at a concentration of 1 mg/ml was separated at a flow rate of 0.6 ml/min in 20 mM phosphate pH 6.8, 114 mM NaCl. Chromatogram profiles were monitored using OD214 nm and OD280 nm. Column calibration for all assays were performed using a size exclusion calibration standard from BioRad; the markers include thyroglobulin (670 kDa), bovine gamma-globulin (158 kDa), chicken ovalbumin (44 kDa), equine myoglobuin (17 kDa) and vitamin B12 (1.35 kDa). Representative chromatographic profiles of Glucagon-Y288, Glucagon-Y144, Glucagon-Y72, Glucagon-Y36 are shown as an overlay in FIG. 34. The data show that the apparent molecular weight of each compound is proportional to the length of the attached XTEN sequence. However, the data also show that the apparent molecular weight of each construct is significantly larger than that expected for a globular protein (as shown by comparison to the standard proteins run in the same assay). Based on the SEC analyses for all constructs evaluated, including a GHXTEN composition, the Apparent Molecular Weights, the Apparent Molecular Weight Factor (expressed as the ratio of Apparent Molecular Weight to the calculated molecular weight) and the hydrodynamic radius (R_{H} in nm) are shown in Table 24. The results indicate that incorporation of different XTENs of 576 amino acids or greater confers an apparent molecular weight for the fusion protein of approximately 339 kDa to 760, and that XTEN of 864 amino acids or greater confers an apparent molecular weight greater than approximately 800 kDA. The results of proportional increases in apparent molecular weight to actual molecular weight were consistent for fusion proteins created with XTEN from several different motif families; i.e., AD, AE, AF, AG, and AM, with increases of at least four-fold and ratios as high as about 17-fold. Additionally, the incorporation of XTEN fusion partners with 576 amino acids or more into fusion proteins with the various payloads (and 288 residues in the case of glucagon fused to Y288) resulted with a hydrodynamic radius of 7 nm or greater; well beyond the glomerular pore size of approximately 3-5 nm. Accordingly, it is expected that fusion proteins comprising growth and XTEN have reduced renal clearance, contributing to increased terminal half-life and improving the therapeutic or biologic effect relative to a corresponding un-fused biologic payload protein.

TABLE 24
SEC analysis of various polypeptides

| | | | | | Apparent | |
|---|---|---|---|---|---|---|
| | XTEN or | | Actual | Apparent | Molecular | |
| Construct | fusion | Therapeutic | MW | MW | Weight | R_{H} |
| Name | partner | Protein | (kDa) | (kDa) | Factor | (nm) |
| AC14 | Y288 | Glucagon | 28.7 | 370 | 12.9 | 7.0 |
| AC28 | Y144 | Glucagon | 16.1 | 117 | 7.3 | 5.0 |
| AC34 | Y72 | Glucagon | 9.9 | 58.6 | 5.9 | 3.8 |
| AC33 | Y36 | Glucagon | 6.8 | 29.4 | 4.3 | 2.6 |
| AC89 | AF120 | Glucagon | 14.1 | 76.4 | 5.4 | 4.3 |
| AC88 | AF108 | Glucagon | 13.1 | 61.2 | 4.7 | 3.9 |
| AC73 | AF144 | Glucagon | 16.3 | 95.2 | 5.8 | 4.7 |
| AC53 | AG576 | GFP | 74.9 | 339 | 4.5 | 7.0 |
| AC39 | AD576 | GFP | 76.4 | 546 | 7.1 | 7.7 |
| AC41 | AE576 | GFP | 80.4 | 760 | 9.5 | 8.3 |
| AC52 | AF576 | GFP | 78.3 | 526 | 6.7 | 7.6 |
| AC85 | AE864 | Exendin-4 | 83.6 | 938 | 11.2 | 8.9 |
| AC114 | AM875 | Exendin-4 | 82.4 | 1344 | 16.3 | 9.4 |
| AC143 | AM875 | hGH | 100.6 | 846 | 8.4 | 8.7 |
| AC227 | AM875 | IL-1ra | 95.4 | 1103 | 11.6 | 9.2 |
| AC228 | AM1318 | IL-1ra | 134.8 | 2286 | 17.0 | 10.5 |

### Example 38

### Pharmacokinetics of Extended Polypeptides Fused to GFP in Cynomolgus Monkeys

[0398] The pharmacokinetics of GFP-L288, GFP-L576, GFP-XTEN_AF576, GFP-XTEN_Y576 and XTEN_AD836-GFP were tested in cynomolgus monkeys to determine the effect of composition and length of the unstructured polypeptides on PK parameters. Blood samples were analyzed at various times after injection and the concentration of GFP in plasma was measured by ELISA using a polyclonal antibody against GFP for capture and a biotinylated preparation of the same polyclonal antibody for detection. Results are summarized in FIG. 35. They show a surprising increase of half-life with increasing length of the XTEN sequence. For example, a half-life of 10 h was determined for GFP-XTEN_L288 (with 288 amino acid residues in the XTEN). Doubling the length of the unstructured polypeptide fusion partner to 576 amino acids increased the half-life to 20-22 h for multiple fusion protein constructs; i.e., GFP-XTEN_L576, GFP-XTEN_AF576, GFP-XTEN_Y576. A further increase of the unstructured polypeptide fusion partner length to 836 residues resulted in a half-life of 72-75 h for XTEN_AD836-GFP. Thus, increasing the polymer length by 288 residues from 288 to 576 residues increased in vivo half-life by about 10 h. However, increasing the polypeptide length by 260 residues from 576 residues to 836 residues increased half-life by more than 50 h. These results show that there is a surprising threshold of unstructured polypeptide length that results in a greater than proportional gain in in vivo half-life. Thus, fusion proteins comprising extended, unstructured polypeptides are expected to have the property of enhanced pharmacokinetics compared to polypeptides of shorter lengths.

### Example 39

### Serum Stability of XTEN

[0399] A fusion protein containing XTEN_AE864 fused to the N-terminus of GFP was incubated in monkey plasma and rat kidney lysate for up to 7 days at 37° C. Samples were withdrawn at time 0, Day 1 and Day 7 and analyzed by SDS PAGE followed by detection using Western analysis and detection with antibodies against GFP as shown in FIG. 14. The sequence of XTEN_AE864 showed negligible signs of degradation over 7 days in plasma. However, XTEN_AE864 was rapidly degraded in rat kidney lysate over 3 days. The in vivo stability of the fusion protein was tested in plasma samples wherein the GFP_AE864 was immunoprecipitated and analyzed by SDS PAGE as described above. Samples that were withdrawn up to 7 days after injection showed very few signs of degradation. The results demonstrate the resistance of GHXTEN to degradation due to serum proteases; a factor in the enhancement of pharmacokinetic properties of the GHXTEN fusion proteins.

### Example 40

### PK Analysis of Ex4-XTEN Fusion Protein in Multiple Species and Predicted Human Half-Life

[0400] To determine the predicted pharmacokinetic profile in humans of a therapeutic protein fused to XTEN, studies were performed using exendin-4 fused to the AE864 XTEN as a single fusion polypeptide. The Ex4-XTEN construct was administered to four different animal species at 0.5-1.0 mg/kg, subcutaneously and intravenously. Serum samples were collected at intervals following administration, with serum concentrations determined using standard methods. The half-life for each species was determined, and is tabulated in Table 25. The results were used to predict the human half-life using allometric scaling of terminal half-life, volume of distribution, and clearance rates based on average body mass. FIG. 36A shows a plot of measured terminal half-life versus body mass in the animal species, with a predicted T_{1/2} in a 75 kg human of 140 h, compared to the reported half-life of exenatide of 2.4 h (Bond, A. Proc (Bayl Univ Med Cent) 19(3): 281-284. (2006)). FIG. 36B shows measured drug clearance versus body mass, with a predicted clearance rate value of 30 ml/h in a 75 kg human FIG. 36C shows measured volume of distribution versus body mass, with a predicted value of 5970 ml in a 75 kg human.

[0401] Conclusions: It can be concluded from the results that addition of an XTEN to a glucose-regulating peptide, such as exendin-4, can greatly increase the terminal half-life compared to the peptide not linked to XTEN.

TABLE 25
Half-life of Ex4-XTEN

| Species | Half-Life (hr) |
|---|---|
| Mouse | 13.5 |
| Rat | 31.7 |
| Monkey | 60.7 |
| Dog | 72.8 |
| Human | 140* |

*Predicted value based on allometric scaling

### Example 41

### Increasing Solubility and Stability of a Peptide Payload by Linking to XTEN

[0402] In order to evaluate the ability of XTEN to enhance the physical/chemical properties of solubility and stability, fusion proteins of glucagon plus shorter-length XTEN were prepared and evaluated. The test articles were prepared in Tris-buffered saline at neutral pH and characterization of the Gcg-XTEN solution was by reverse-phase HPLC and size exclusion chromatography to affirm that the protein was homogeneous and non-aggregated in solution. The data are presented in Table 26. For comparative purposes, the solubility limit of unmodified glucagon in the same buffer was measured at 60 μM (0.2 mg/mL), and the result demonstrate that for all lengths of XTEN added, a substantial increase in solubility was attained. Importantly, in most cases the glucagon-XTEN fusion proteins were prepared to achieve target concentrations and were not evaluated to determine the maximum solubility limits for the given construct. However, in the case of glucagon linked to the AF-144 XTEN, the limit of solubility was determined, with the result that a 60-fold increase in solubility was achieved, compared to glucagon not linked to XTEN. In addition, the glucagon-AF144 GHXTEN was evaluated for stability, and was found to be stable in liquid formulation for at least 6 months under refrigerated conditions and for approximately one month at 37° C. (data not shown).

[0403] Conclusions: The data support the conclusion that the linking of short-length XTEN polypeptides to a biologically active protein such as glucagon can markedly enhance the solubility properties of the protein by the resulting fusion protein, as well as confer stability at the higher protein concentrations.

TABLE 26
Solubility of Glucagon-XTEN constructs

| Test Article | Solubility |
|---|---|
| Glucagon | 60 μM |
| Glucagon-Y36 | >370 μM |
| Glucagon-Y72 | >293 μM |
| Glucagon-AF108 | >145 μM |
| Glucagon-AF120 | >160 μM |
| Glucagon-Y144 | >497 μM |
| Glucagon-AE144 | >467 μM |
| Glucagon-AF144 | >3600 μM |
| Glucagon-Y288 | >163 μM |

### Example 42

### Characterization of XTEN Fusion Protein Secondary Structure

[0404] The fusion protein Ex4-AE864 was evaluated for degree of secondary structure by circular dichroism spectroscopy. CD spectroscopy was performed on a Jasco J-715 (Jasco Corporation, Tokyo, Japan) spectropolarimeter equipped with Jasco Peltier temperature controller (TPC-348WI). The concentration of protein was adjusted to 0.2 mg/mL in 20 mM sodium phosphate pH 7.0, 50 mM NaCl. The experiments were carried out using HELLMA quartz cells with an optical path-length of 0.1 cm. The CD spectra were acquired at 5°, 25°, 45°, and 65° C. and processed using the J-700 version 1.08.01 (Build 1) Jasco software for Windows. The samples were equilibrated at each temperature for 5 min before performing CD measurements. All spectra were recorded in duplicate from 300 nm to 185 nm using a bandwidth of 1 nm and a time constant of 2 sec, at a scan speed of 100 nm/min. The CD spectrum shown in FIG. 37 shows no evidence of stable secondary structure and is consistent with an unstructured polypeptide.

### Example 43

### Analysis of Sequences for Secondary Structure by Prediction Algorithms

[0405] Amino acid sequences can be assessed for secondary structure via certain computer programs or algorithms, such as the well-known Chou-Fasman algorithm (Chou, P. Y., et al. (1974) Biochemistry, 13: 222-45) and the Garnier-Osguthorpe-Robson, or “GOR” method (Gamier J, Gibrat J F, Robson B. (1996). GOR method for predicting protein secondary structure from amino acid sequence. Methods Enzymol 266:540-553). For a given sequence, the algorithms can predict whether there exists some or no secondary structure at all, expressed as total and/or percentage of residues of the sequence that form, for example, alpha-helices or beta-sheets or the percentage of residues of the sequence predicted to result in random coil formation.

[0406] Several representative sequences from XTEN “families” have been assessed using two algorithm tools for the Chou-Fasman and GOR methods to assess the degree of secondary structure in these sequences. The Chou-Fasman tool was provided by William R Pearson and the University of Virginia, at the “Biosupport” internet site, URL located on the World Wide Web at fasta.bioch.virginia.edu/fasta_www2/fasta_www.cgi?rm=misc1 as it existed on Jun. 19, 2009. The GOR tool was provided by Pole Informatique Lyonnais at the Network Protein Sequence Analysis internet site, URL located on the World Wide Web at .npsa-pbil.ibcp.fr/cgi-bin/secpred_gor4.pl as it existed on Jun. 19, 2008.

[0407] As a first step in the analyses, a single XTEN sequence was analyzed by the two algorithms. The AE864 composition is a XTEN with 864 amino acid residues created from multiple copies of four 12 amino acid sequence motifs consisting of the amino acids G, S, T, E, P, and A. The sequence motifs are characterized by the fact that there is limited repetitiveness within the motifs and within the overall sequence in that the sequence of any two consecutive amino acids is not repeated more than twice in any one 12 amino acid motif, and that no three contiguous amino acids of full-length the XTEN are identical. Successively longer portions of the AF 864 sequence from the N-terminus were analyzed by the Chou-Fasman and GOR algorithms (the latter requires a minimum length of 17 amino acids). The sequences were analyzed by entering the FASTA format sequences into the prediction tools and running the analysis. The results from the analyses are presented in Table 27.

[0408] The results indicate that, by the Chou-Fasman calculations, the four motifs of the AE family (Table 1) have no alpha-helices or beta sheets. The sequence up to 288 residues was similarly found to have no alpha-helices or beta sheets. The 432 residue sequence is predicted to have a small amount of secondary structure, with only 2 amino acids contributing to an alpha-helix for an overall percentage of 0.5%. The full-length AF864 polypeptide has the same two amino acids contributing to an alpha-helix, for an overall percentage of 0.2%. Calculations for random coil formation revealed that with increasing length, the percentage of random coil formation increased. The first 24 amino acids of the sequence had 91% random coil formation, which increased with increasing length up to the 99.77% value for the full-length sequence.

[0409] Numerous XTEN sequences of 500 amino acids or longer from the other motif families were also analyzed and revealed that the majority had greater than 95% random coil formation. The exceptions were those sequences with one or more instances of three contiguous serine residues, which resulted in predicted beta-sheet formation. However, even these sequences still had approximately 99% random coil formation.

[0410] In contrast, a polypeptide sequence of 84 residues limited to A, S, and P amino acids was assessed by the Chou-Fasman algorithm, which predicted a high degree of predicted alpha-helices. The sequence, which had multiple repeat “AA” and “AAA” sequences, had an overall predicted percentage of alpha-helix structure of 69%. The GOR algorithm predicted 78.57% random coil formation; far less than any sequence consisting of 12 amino acid sequence motifs consisting of the amino acids G, S, T, E, P, analyzed in the present Example.

[0411] Conclusions: The analysis supports the conclusion that: 1) XTEN created from multiple sequence motifs of G, S, T, E, P, and A that have limited repetitiveness as to contiguous amino acids are predicted to have very low amounts of alpha-helices and beta-sheets; 2) that increasing the length of the XTEN does not appreciably increase the probability of alpha-helix or beta-sheet formation; and 3) that progressively increasing the length of the XTEN sequence by addition of non-repetitive 12-mers consisting of the amino acids G, S, T, E, P, and A results in increased percentage of random coil formation. In contrast, polypeptides created from amino acids limited to A, S and P that have a higher degree of internal repetitiveness are predicted to have a high percentage of alpha-helices, as determined by the Chou-Fasman algorithm, as well as random coil formation. Based on the numerous sequences evaluated by these methods, it is concluded that XTEN created from sequence motifs of G, S, T, E, P, and A that have limited repetitiveness (defined as no more than two identical contiguous amino acids in any one motif) greater than about 400 amino acid residues in length are expected to have very limited secondary structure. With the exception of motifs containing three contiguous serines, it is believed that any order or combination of sequence motifs from Table 1 can be used to create an XTEN polypeptide of a length greater than about 400 residues that will result in an XTEN sequence that is substantially devoid of secondary structure. Such sequences are expected to have the characteristics described in the GHXTEN embodiments of the invention disclosed herein.

TABLE 27
CHOU-FASMAN and GOR prediction calculations of polypeptide sequences

| SEQ | | SEQ ID | No. | Chou-Fasman | GOR |
|---|---|---|---|---|---|
| NAME | Sequence | NO: | Residues | Calculation | Calculation |
| | GSTSESPSGTAP | 624 | 12 | Residue totals*: H: 0 E: 0 | Not |
| | | | | percent: H: 0.0 E: 0.0 | Determined |
| | GTSTPESGSASP | 625 | 12 | Residue totals: H: 0 E: 0 | Not |
| | | | | percent: H: 0.0 E: 0.0 | Determined |
| | GTSPSGESSTAP | 626 | 12 | Residue totals: H: 0 E: 0 | Not |
| | | | | percent: H: 0.0 E: 0.0 | Determined |
| | GSTSSTAESPGP | 627 | 12 | Residue totals: H: 0 E: 0 | Not |
| | | | | percent: H: 0.0 E: 0.0 | Determined |
| | GSPAGSPTSTEEGTSESATPESGP | 628 | 24 | Residue totals: H: 0 E: 0 | 91.67% |
| | | | | percent: H: 0.0 E: 0.0 | |
| | GSPAGSPTSTEEGTSESATPESGPG | 629 | 36 | Residue totals: H: 0 E: 0 | 94.44% |
| | TSTEPSEGSAP | | | percent: H: 0.0 E: 0.0 | |
| | GSPAGSPTSTEEGTSESATPESGPG | 630 | 48 | Residue totals: H: 0 E: 0 | 93.75% |
| | TSTEPSEGSAPGSPAGSPTSTEE | | | percent: H: 0.0 E: 0.0 | |
| | GSPAGSPTSTEEGTSESATPESGPG | 631 | 60 | Residue totals: H: 0 E: 0 | 96.67% |
| | TSTEPSEGSAPGSPAGSPTSTEEGTS | | | percent: H: 0.0 E: 0.0 | |
| | TEPSEGSAP | | | | |
| | GSPAGSPTSTEEGTSESATPESGPG | 632 | 108 | Residue totals: H: 0 E: 0 | 97.22% |
| | TSTEPSEGSAPGSPAGSPTSTEEGTS | | | percent: H: 0.0 E: 0.0 | |
| | TEPSEGSAPGTSTEPSEGSAPGTSES | | | | |
| | ATPESGPGSEPATSGSE | | | | |
| | TPGSEPATSGSETP | | | | |
| | GSPAGSPTSTEEGTSESATPESGPG | 633 | 216 | Residue totals: H: 0 E: 0 | 99.07% |
| | TSTEPSEGSAPGSPAGSPTSTEEGTS | | | percent: H: 0.0 E: 0.0 | |
| | TEPSEGSAPGTSTEPSEGSAPGTSES | | | | |
| | ATPESGPGSEPATSGSETPGSEPAT | | | | |
| | SGSETPGSPAGSPTSTEEGTSESATP | | | | |
| | ESGPGTSTEPSEGSAPGTSTEPSEGS | | | | |
| | APGSPAGSPTSTEEGTSTEPSEGSA | | | | |
| | PGTSTEPSEGSAPGTSESATPESGP | | | | |
| | GTSTEPSEGSAP | | | | |
| | GSPAGSPTSTEEGTSESATPESGPG | 634 | 432 | Residue totals: H: 2 E: 3 | 99.54% |
| | TSTEPSEGSAPGSPAGSPTSTEEGTS | | | percent: H: 0.5 E: 0.7 | |
| | TEPSEGSAPGTSTEPSEGSAPGTSES | | | | |
| | ATPESGPGSEPATSGSETPGSEPAT | | | | |
| | SGSETPGSPAGSPTSTEEGTSESATP | | | | |
| | ESGPGTSTEPSEGSAPGTSTEPSEGS | | | | |
| | APGSPAGSPTSTEEGTSTEPSEGSA | | | | |
| | PGTSTEPSEGSAPGTSESATPESGP | | | | |
| | GTSTEPSEGSAPGTSESATPESGPG | | | | |
| | SEPATSGSETPGTSTEPSEGSAPGTS | | | | |
| | TEPSEGSAPGTSESATPESGPGTSES | | | | |
| | ATPESGPGSPAGSPTSTEEGTSESA | | | | |
| | TPESGPGSEPATSGSETPGTSESATP | | | | |
| | ESGPGTSTEPSEGSAPGTSTEPSEGS | | | | |
| | APGTSTEPSEGSAPGTSTEPSEGSA | | | | |
| | PGTSTEPSEGSAPGTSTEPSEGSAP | | | | |
| | GSPAGSPTSTEEGTSTEPSEGSAP | | | | |
| AE864 | GSPAGSPTSTEEGTSESATPESGPG | 635 | 864 | Residue totals: H: 2 E: 3 | 99.77% |
| | TSTEPSEGSAPGSPAGSPTSTEEGTS | | | percent: H: 0.2 E: 0.3 | |
| | TEPSEGSAPGTSTEPSEGSAPGTSES | | | | |
| | ATPESGPGSEPATSGSETPGSEPAT | | | | |
| | SGSETPGSPAGSPTSTEEGTSESATP | | | | |
| | ESGPGTSTEPSEGSAPGTSTEPSEGS | | | | |
| | APGSPAGSPTSTEEGTSTEPSEGSA | | | | |
| | PGTSTEPSEGSAPGTSESATPESGP | | | | |
| | GTSTEPSEGSAPGTSESATPESGPG | | | | |
| | SEPATSGSETPGTSTEPSEGSAPGTS | | | | |
| | TEPSEGSAPGTSESATPESGPGTSES | | | | |
| | ATPESGPGSPAGSPTSTEEGTSESA | | | | |
| | TPESGPGSEPATSGSETPGTSESATP | | | | |
| | ESGPGTSTEPSEGSAPGTSTEPSEGS | | | | |
| | APGTSTEPSEGSAPGTSTEPSEGSA | | | | |
| | PGTSTEPSEGSAPGTSTEPSEGSAP | | | | |
| | GSPAGSPTSTEEGTSTEPSEGSAPG | | | | |
| | TSESATPESGPGSEPATSGSETPGTS | | | | |
| | ESATPESGPGSEPATSGSETPGTSES | | | | |
| | ATPESGPGTSTEPSEGSAPGTSESA | | | | |
| | TPESGPGSPAGSPTSTEEGSPAGSPT | | | | |
| | STEEGSPAGSPTSTEEGTSESATPES | | | | |
| | GPGTSTEPSEGSAPGTSESATPESG | | | | |
| | PGSEPATSGSETPGTSESATPESGP | | | | |
| | GSEPATSGSETPGTSESATPESGPG | | | | |
| | TSTEPSEGSAPGSPAGSPTSTEEGTS | | | | |
| | ESATPESGPGSEPATSGSETPGTSES | | | | |
| | ATPESGPGSPAGSPTSTEEGSPAGS | | | | |
| | PTSTEEGTSTEPSEGSAPGTSESATP | | | | |
| | ESGPGTSESATPESGPGTSESATPES | | | | |
| | GPGSEPATSGSETPGSEPATSGSET | | | | |
| | PGSPAGSPTSTEEGTSTEPSEGSAP | | | | |
| | GTSTEPSEGSAPGSEPATSGSETPG | | | | |
| | TSESATPESGPGTSTEPSEGSAP | | | | |
| AD 576 | GSSESGSSEGGPGSGGEPSESGSSG | 636 | 576 | Residue totals: H: 7 E: 0 | 99.65% |
| | SSESGSSEGGPGSSESGSSEGGPGSS | | | percent: H: 1.2 E: 0.0 | |
| | ESGSSEGGPGSSESGSSEGGPGSSE | | | | |
| | SGSSEGGPGESPGGSSGSESGSEGS | | | | |
| | SGPGESSGSSESGSSEGGPGSSESGS | | | | |
| | SEGGPGSSESGSSEGGPGSGGEPSE | | | | |
| | SGSSGESPGGSSGSESGESPGGSSG | | | | |
| | SESGSGGEPSESGSSGSSESGSSEG | | | | |
| | GPGSGGEPSESGSSGSGGEPSESGS | | | | |
| | SGSEGSSGPGESSGESPGGSSGSES | | | | |
| | GSGGEPSESGSSGSGGEPSESGSSG | | | | |
| | SGGEPSESGSSGSSESGSSEGGPGE | | | | |
| | SPGGSSGSESGESPGGSSGSESGESP | | | | |
| | GGSSGSESGESPGGSSGSESGESPG | | | | |
| | GSSGSESGSSESGSSEGGPGSGGEP | | | | |
| | SESGSSGSEGSSGPGESSGSSESGSS | | | | |
| | EGGPGSGGEPSESGSSGSSESGSSE | | | | |
| | GGPGSGGEPSESGSSGESPGGSSGS | | | | |
| | ESGESPGGSSGSESGSSESGSSEGG | | | | |
| | PGSGGEPSESGSSGSSESGSSEGGP | | | | |
| | GSGGEPSESGSSGSGGEPSESGSSG | | | | |
| | ESPGGSSGSESGSEGSSGPGESSGSS | | | | |
| | ESGSSEGGPGSEGSSGPGESS | | | | |
| AE576 | GSPAGSPTSTEEGTSESATPESGPG | 637 | 576 | Residue totals: H: 2 E: 0 | 99.65% |
| | TSTEPSEGSAPGSPAGSPTSTEEGTS | | | percent: H: 0.4 E: 0.0 | |
| | TEPSEGSAPGTSTEPSEGSAPGTSES | | | | |
| | ATPESGPGSEPATSGSETPGSEPAT | | | | |
| | SGSETPGSPAGSPTSTEEGTSESATP | | | | |
| | ESGPGTSTEPSEGSAPGTSTEPSEGS | | | | |
| | APGSPAGSPTSTEEGTSTEPSEGSA | | | | |
| | PGTSTEPSEGSAPGTSESATPESGP | | | | |
| | GTSTEPSEGSAPGTSESATPESGPG | | | | |
| | SEPATSGSETPGTSTEPSEGSAPGTS | | | | |
| | TEPSEGSAPGTSESATPESGPGTSES | | | | |
| | ATPESGPGSPAGSPTSTEEGTSESA | | | | |
| | TPESGPGSEPATSGSETPGTSESATP | | | | |
| | ESGPGTSTEPSEGSAPGTSTEPSEGS | | | | |
| | APGTSTEPSEGSAPGTSTEPSEGSA | | | | |
| | PGTSTEPSEGSAPGTSTEPSEGSAP | | | | |
| | GSPAGSPTSTEEGTSTEPSEGSAPG | | | | |
| | TSESATPESGPGSEPATSGSETPGTS | | | | |
| | ESATPESGPGSEPATSGSETPGTSES | | | | |
| | ATPESGPGTSTEPSEGSAPGTSESA | | | | |
| | TPESGPGSPAGSPTSTEEGSPAGSPT | | | | |
| | STEEGSPAGSPTSTE7EGTSESATPE | | | | |
| | SGPGTSTEPSEGSAP | | | | |
| AF540 | GSTSSTAESPGPGSTSSTAESPGPGS | 638 | 540 | Residue totals: H: 2 E: 0 | 99.65 |
| | TSESPSGTAPGSTSSTAESPGPGSTS | | | percent: H: 0.4 E: 0.0 | |
| | STAESPGPGTSTPESGSASPGSTSES | | | | |
| | PSGTAPGTSPSGESSTAPGSTSESPS | | | | |
| | GTAPGSTSESPSGTAPGTSPSGESST | | | | |
| | APGSTSESPSGTAPGSTSESPSGTAP | | | | |
| | GTSPSGESSTAPGSTSESPSGTAPGS | | | | |
| | TSESPSGTAPGSTSESPSGTAPGTST | | | | |
| | PESGSASPGSTSESPSGTAPGTSTPE | | | | |
| | SGSASPGSTSSTAESPGPGSTSSTAE | | | | |
| | SPGPGTSTPESGSASPGTSTPESGSA | | | | |
| | SPGSTSESPSGTAPGTSTPESGSASP | | | | |
| | GTSTPESGSASPGSTSESPSGTAPGS | | | | |
| | TSESPSGTAPGSTSESPSGTAPGSTS | | | | |
| | STAESPGPGTSTPESGSASPGTSTPE | | | | |
| | SGSASPGSTSESPSGTAPGSTSESPS | | | | |
| | GTAPGTSTPESGSASPGSTSESPSGT | | | | |
| | APGSTSESPSGTAPGTSTPESGSASP | | | | |
| | GTSPSGESSTAPGSTSSTAESPGPGT | | | | |
| | SPSGESSTAPGSTSSTAESPGPGTST | | | | |
| | PESGSASPGSTSESPSGTAP | | | | |
| AF504 | GASPGTSSTGSPGSSPSASTGTGPG | 639 | 504 | Residue totals: H: 0 E: 0 | 94.44% |
| | SSPSASTGTGPGTPGSGTASSSPGSS | | | percent: H: 0.0 E: 0.0 | |
| | TPSGATGSPGSNPSASTGTGPGASP | | | | |
| | GTSSTGSPGTPGSGTASSSPGSSTPS | | | | |
| | GATGSPGTPGSGTASSSPGASPGTS | | | | |
| | STGSPGASPGTSSTGSPGTPGSGTA | | | | |
| | SSSPGSSTPSGATGSPGASPGTSSTG | | | | |
| | SPGTPGSGTASSSPGSSTPSGATGSP | | | | |
| | GSNPSASTGTGPGSSPSASTGTGPG | | | | |
| | SSTPSGATGSPGSSTPSGATGSPGA | | | | |
| | SPGTSSTGSPGASPGTSSTGSPGASP | | | | |
| | GTSSTGSPGTPGSGTASSSPGASPG | | | | |
| | TSSTGSPGASPGTSSTGSPGASPGT | | | | |
| | SSTGSPGSSPSASTGTGPGTPGSGT | | | | |
| | ASSSPGASPGTSSTGSPGASPGTSST | | | | |
| | GSPGASPGTSSTGSPGSSTPSGATG | | | | |
| | SPGSSTPSGATGSPGASPGTSSTGSP | | | | |
| | GTPGSGTASSSPGSSTPSGATGSPG | | | | |
| | SSTPSGATGSPGSSTPSGATGSPGSS | | | | |
| | PSASTGTGPGASPGTSSTGSP | | | | |
| AE864 | GSPAGSPTSTEEGTSESATPESGPG | 640 | 864 | Residue totals: H: 2 E: 3 | 99.77% |
| | TSTEPSEGSAPGSPAGSPTSTEEGTS | | | percent: H: 0.2 E: 0.4 | |
| | TEPSEGSAPGTSTEPSEGSAPGTSES | | | | |
| | ATPESGPGSEPATSGSETPGSEPAT | | | | |
| | SGSETPGSPAGSPTSTEEGTSESATP | | | | |
| | ESGPGTSTEPSEGSAPGTSTEPSEGS | | | | |
| | APGSPAGSPTSTEEGTSTEPSEGSA | | | | |
| | PGTSTEPSEGSAPGTSESATPESGP | | | | |
| | GTSTEPSEGSAPGTSESATPESGPG | | | | |
| | SEPATSGSETPGTSTEPSEGSAPGTS | | | | |
| | TEPSEGSAPGTSESATPESGPGTSES | | | | |
| | ATPESGPGSPAGSPTSTEEGTSESA | | | | |
| | TPESGPGSEPATSGSETPGTSESATP | | | | |
| | ESGPGTSTEPSEGSAPGTSTEPSEGS | | | | |
| | APGTSTEPSEGSAPGTSTEPSEGSA | | | | |
| | PGTSTEPSEGSAPGTSTEPSEGSA | | | | |
| | GSPAGSPTSTEEGTSTEPSEGSAPG | | | | |
| | TSESATPESGPGSEPATSGSETPGTS | | | | |
| | ESATPESGPGSEPATSGSETPGTSES | | | | |
| | ATPESGPGTSTEPSEGSAPGTSESA | | | | |
| | TPESGPGSPAGSPTSTEEGSPAGSPT | | | | |
| | STEEGSPAGSPTSTEEGTSESATPES | | | | |
| | GPGTSTEPSEGSAPGTSESATPESG | | | | |
| | PGSEPATSGSETPGTSESATPESGP | | | | |
| | GSEPATSGSETPGTSESATPESGPG | | | | |
| | TSTEPSEGSAPGSPAGSPTSTEEGTS | | | | |
| | ESATPESGPGSEPATSGSETPGTSES | | | | |
| | ATPESGPGSPAGSPTSTEEGSPAGS | | | | |
| | PTSTEEGTSTEPSEGSAPGTSESATP | | | | |
| | ESGPGTSESATPESGPGTSESATPES | | | | |
| | GPGSEPATSGSETPGSEPATSGSET | | | | |
| | PGSPAGSPTSTEEGTSTEPSEGSAP | | | | |
| | GTSTEPSEGSAPGSEPATSGSETPG | | | | |
| | TSESATPESGPGTSTEPSSGSAP | | | | |
| AF864 | GSTSESPSGTAPGTSPSGESSTAPGS | 641 | 875 | Residue totals: H: 2 E: 0 | 95.20% |
| | TSESPSGTAPGSTSESPSGTAPGTST | | | percent: H: 0.2 E: 0.0 | |
| | PESGSASPGTSTPESGSASPGSTSES | | | | |
| | PSGTAPGSTSESPSGTAPGTSPSGES | | | | |
| | STAPGSTSESPSGTAPGTSPSGESST | | | | |
| | APGTSPSGESSTAPGSTSSTAESPGP | | | | |
| | GTSPSGESSTAPGTSPSGESSTAPGS | | | | |
| | TSSTAESPGPGTSTPESGSASPGTST | | | | |
| | PESGSASPGSTSESPSGTAPGSTSES | | | | |
| | PSGTAPGTSTPESGSASPGSTSSTAE | | | | |
| | SPGPGTSTPESGSASPGSTSESPSGT | | | | |
| | APGTSPSGESSTAPGSTSSTAESPGP | | | | |
| | GTSPSGESSTAPGTSTPESGSASPGS | | | | |
| | TSSTAESPGPGSTSSTAESPGPGSTS | | | | |
| | STAESPGPGSTSSTAESPGPGTSPSG | | | | |
| | ESSTAPGSTSESPSGTAPGSTSESPS | | | | |
| | GTAPGTSTPESGPXXXGASASGAP | | | | |
| | STXXXXSESPSGTAPGSTSESPSGT | | | | |
| | APGSTSESPSGTAPGSTSESPSGTAP | | | | |
| | GSTSESPSGTAPGSTSESPSGTAPGT | | | | |
| | STPESGSASPGTSPSGESSTAPGTSP | | | | |
| | SGESSTAPGSTSSTAESPGPGTSPSG | | | | |
| | ESSTAPGTSTPESGSASPGSTSESPS | | | | |
| | GTAPGSTSESPSGTAPGTSPSGESST | | | | |
| | APGSTSESPSGTAPGTSTPESGSASP | | | | |
| | GTSTPESGSASPGSTSESPSGTAPGT | | | | |
| | STPESGSASPGSTSSTAESPGPGSTS | | | | |
| | ESPSGTAPGSTSESPSGTAPGTSPSG | | | | |
| | ESSTAPGSTSSTAESPGPGTSPSGES | | | | |
| | STAPGTSTPESGSASPGTSPSGESST | | | | |
| | APGTSPSGESSTAPGTSPSGESSTAP | | | | |
| | GSTSSTAESPGPGSTSSTAESPGPGT | | | | |
| | SPSGESSTAPGSSPSASTGTGPGSST | | | | |
| | PSGATGSPGSSTPSGATGSP | | | | |
| AG864 | GGSPGASPGTSSTGSPGSSPSASTG | 642 | 868 | Residue totals: H: 0 E: 0 | 94.70% |
| | TGPGSSPSASTGTGPGTPGSGTASS | | | percent: H: 0.0 E: 00 | |
| | SPGSSTPSGATGSPGSNPSASTGTG | | | | |
| | PGASPGTSSTGSPGTPGSGTASSSP | | | | |
| | GSSTPSGATGSPGTPGSGTASSSPG | | | | |
| | ASPGTSSTGSPGASPGTSSTGSPGT | | | | |
| | PGSGTASSSPGSSTPSGATGSPGAS | | | | |
| | PGTSSTGSPGTPGSGTASSSPGSSTP | | | | |
| | SGATGSPGSNPSASTGTGPGSSPSA | | | | |
| | STGT7GPGSSTPSGATGSPGSSTPSG | | | | |
| | ATGSPGASPGTSSTGSPGASPGTSS | | | | |
| | TGSPGASPGTSSTGSPGTPGSGTAS | | | | |
| | SSPGASPGTSSTGSPGASPGTSSTGS | | | | |
| | PGASPGTSSTGSPGSSPSASTGTGP | | | | |
| | GTPGSGTASSSPGASPGTSSTGSPG | | | | |
| | ASPGTSSTGSPGASPGTSSTGSPGSS | | | | |
| | TPSGATGSPGSSTPSGATGSPGASP | | | | |
| | GTSSTGSPGTPGSGTASSSPGSSTPS | | | | |
| | GATGSPGSSTPSGATGSPGSSTPSG | | | | |
| | ATGSPGSSPSASTGTGPGASPGTSS | | | | |
| | TGSPGASPGTSSTGSPGTPGSGTAS | | | | |
| | SSPGASPGTSSTGSPGASPGTSSTGS | | | | |
| | PGASPGTSSTGSPGASPGTSSTGSP | | | | |
| | GTPGSGTASSSPGSSTPSGATGSPG | | | | |
| | TPGSGTASSSPGSSTPSGATGSPGT | | | | |
| | PGSGTASSSPGSSTPSGATGSPGSST | | | | |
| | PSGATGSPGSSPSASTGTGPGSSPS | | | | |
| | ASTGTGPGASPGTSSTGSPGTPGSG | | | | |
| | TASSSPGSSTPSGATGSPGSSPSAST | | | | |
| | GTGPGSSPSASTGTGPGASPGTSST | | | | |
| | GSPGASPGTSSTGSPGSSTPSGATG | | | | |
| | SPGSSPSASTGTGPGASPGTSSTGSP | | | | |
| | GSSPSASTGTGPGTPGSGTASSSPG | | | | |
| | SSTPSGATGSPGSSTPSGATGSPGA | | | | |
| | SPGTSSTGSP | | | | |
| AM875 | GTSTEPSEGSAPGSEPATSGSETPG | 643 | 875 | Residue totals: H: 7 E: 3 | 98.63% |
| | SPAGSPTSTEEGSTSSTAESPGPGTS | | | percent: H: 0.8 E: 0.3 | |
| | TPESGSASPGSTSESPSGTAPGSTSE | | | | |
| | SPSGTAPGTSTPESGSASPGTSTPES | | | | |
| | GSASPGSEPATSGSETPGTSESATP | | | | |
| | ESGPGSPAGSPTSTEEGTSTEPSEGS | | | | |
| | APGTSESATPESGPGTSTEPSEGSA | | | | |
| | PGTSTEPSEGSAPGSPAGSPTSTEE | | | | |
| | GTSTEPSEGSAPGTSTEPSEGSAPG | | | | |
| | TSESATPESGPGTSESATPESGPGTS | | | | |
| | TEPSEGSAPGTSTEPSEGSAPGTSES | | | | |
| | ATPESGPGTSTEPSEGSAPGSEPAT | | | | |
| | SGSETPGSPAGSPTSTEEGSSTPSGA | | | | |
| | TGSPGTPGSGTASSSPGSSTPSGAT | | | | |
| | GSPGTSTEPSEGSAPGTSTEPSEGS | | | | |
| | APGSEPATSGSETPGSPAGSPTSTE | | | | |
| | EGSPAGSPTSTEEGTSTEPSEGSAP | | | | |
| | GASASGAPSTGGTSESATPESGPGS | | | | |
| | PAGSPTSTEEGSPAGSPTSTEEGSTS | | | | |
| | STAESPGPGSTSESPSGTAPGTSPSG | | | | |
| | ESSTAPGTPGSGTASSSPGSSTPSG | | | | |
| | ATGSPGSSPSASTGTGPGSEPATSG | | | | |
| | SETPGTSESATPESGPGSEPATSGSE | | | | |
| | TPGSTSSTAESPGPGSTSSTAESPGP | | | | |
| | GTSPSGESSTAPGSEPATSGSETPGS | | | | |
| | EPATSGSETPGTSTEPSEGSAPGSTS | | | | |
| | STAESPGPGTSTPESGSASPGSTSES | | | | |
| | PSGTAPGTSTEPSEGSAPGTSTEPSE | | | | |
| | GSAPGTSTEPSEGSAPGSSTPSGAT | | | | |
| | GSPGSSPSASTGTGPGASPGTSSTG | | | | |
| | SPGSEPATSGSETPGTSESATPESGP | | | | |
| | GSPAGSPTSTEEGSSTPSGATGSPG | | | | |
| | SSPSASTGTGPGASPGTSSTGSPGT | | | | |
| | SESATPESGPGTSTEPSEGSAPGTST | | | | |
| | EPSEGSA | | | | |
| AM1318 | GTSTEPSEGSAPGSEPATSGSETPG | 644 | 1318 | Residue totals: H: 7 E: 0 | 99.17% |
| | SPAGSPTSTEEGSTSSTAESPGPGTS | | | percent: H: 0.7: E: 0.0 | |
| | TPESGSASPGSTSESPSGTAPGSTSE | | | | |
| | SPSGTAPGTSTPESGSASPGTSTPES | | | | |
| | GSASPGSEPATSGSETPGTSESATP | | | | |
| | ESGPGSPAGSPTSTEEGTSTEPSEGS | | | | |
| | APGTSESATPESGPGTSTEPSEGSA | | | | |
| | PGTSTEPSEGSAPGSPAGSPTSTEE | | | | |
| | GTSTEPSEGSAPGTSTEPSEGSAPG | | | | |
| | TSESATPESGPGTSESATPESGPGTS | | | | |
| | TEPSEGSAPGTSTEPSEGSAPGTSES | | | | |
| | ATPESGPGTSTEPSEGSAPGSEPAT | | | | |
| | SGSETPGSPAGSPTSTEEGSSTPSGA | | | | |
| | TGSPGTPGSGTASSSPGSSTPSGAT | | | | |
| | GSPGTSTEPSEGSAPGTSTEPSEGS | | | | |
| | APGSEPATSGSETPGSPAGSPTSTE | | | | |
| | EGSPAGSPTSTEEGTSTEPSEGSAP | | | | |
| | GPEPTGPAPSGGSEPATSGSETPGT | | | | |
| | SESATPESGPGSPAGSPTSTEEGTSE | | | | |
| | SATPESGPGSPAGSPTSTEEGSPAG | | | | |
| | SPTSTEEGTSESATPESGPGSPAGSP | | | | |
| | TSTEEGSPAGSPTSTEEGSTSSTAES | | | | |
| | PGPGSTSESPSGTAPGTSPSGESSTA | | | | |
| | PGSTSESPSGTAPGSTSESPSGTAPG | | | | |
| | TSPSGESSTAPGTSTEPSEGSAPGTS | | | | |
| | ESATPESGPGTSESATPESGPGSEP | | | | |
| | ATSGSETPGTSESATPESGPGTSES | | | | |
| | ATPESGPGTSTEPSEGSAPGTSESA | | | | |
| | TPESGPGTSTEPSEGSAPGTSPSGES | | | | |
| | STAPGTSPSGESSTAPGTSPSGESST | | | | |
| | APGTSTEPSEGSAPGSPAGSPTSTE | | | | |
| | EGTSTEPSEGSAPGSSPSASTGTGP | | | | |
| | GSSTPSGATGSPGSSTPSGATGSPG | | | | |
| | SSTPSGATGSPGSSTPSGATGSPGA | | | | |
| | SPGTSSTGSPGASASGAPSTGGTSP | | | | |
| | SGESSTAPGSTSSTAESPGPGTSPSG | | | | |
| | ESSTAPGTSESATPESGPGTSTEPSE | | | | |
| | GSAPGTSTEPSEGSAPGSSPSASTG | | | | |
| | TGPGSSTPSGATGSPGASPGTSSTG | | | | |
| | SPGTSTPESGSASPGTSPSGESSTAP | | | | |
| | GTSPSGESSTAPGTSESATPESGPGS | | | | |
| | EPATSGSETPGTSTEPSEGSAPGSTS | | | | |
| | ESPSGTAPGSTSESPSGTAPGTSTPE | | | | |
| | SGSASPGSPAGSPTSTEEGTSESATP | | | | |
| | ESGPGTSTEPSEGSAPGSPAGSPTST | | | | |
| | EEGTSESATPESGPGSEPATSGSETP | | | | |
| | GSSTPSGATGSPGASPGTSSTGSPG | | | | |
| | SSTPSGATGSPGSTSESPSGTAPGTS | | | | |
| | PSGESSTAPGSTSSTAESPGPGSSTP | | | | |
| | SGATGSPGASPGTSSTGSPGTPGSG | | | | |
| | TASSSPGSPAGSPTSTEEGSPAGSPT | | | | |
| | STEEGTSTEPSEGSAP | | | | |
| AM923 | MAEPAGSPTSTEEGASPGTSSTGSP | 645 | 924 | Residue totals: H: 4 E: 3 | 98.70% |
| | GSSTPSGATGSPGSSTPSGATGSPG | | | percent: H: 0.4 E: 0.3 | |
| | TSTEPSEGSAPGSEPATSGSETPGSP | | | | |
| | AGSPTSTEEGSTSSTAESPGPGTSTP | | | | |
| | ESGSASPGSTSESPSGTAPGSTSESP | | | | |
| | SGTAPGTSTPESGSASPGTSTPESGS | | | | |
| | ASPGSEPATSGSETPGTSESATPES | | | | |
| | GPGSPAGSPTSTEEGTSTEPSEGSA | | | | |
| | PGTSESATPESGPGTSTEPSEGSAP | | | | |
| | GTSTEPSEGSAPGSPAGSPTSTEEG | | | | |
| | TSTEPSEGSAPGTSTEPSEGSAPGTS | | | | |
| | ESATPESGPGTSESATPESGPGTSTE | | | | |
| | PSEGSAPGTSTEPSEGSAPGTSESA | | | | |
| | TPESGPGTSTEPSEGSAPGSEPATS | | | | |
| | GSETPGSPAGSPTSTEEGSSTPSGA | | | | |
| | TGSPGTPGSGTASSSPGSSTPSGAT | | | | |
| | GSPGTSTEPSEGSAPGTSTEPSEGS | | | | |
| | APGSEPATSGSETPGSPAGSPTSTE | | | | |
| | EGSPAGSPTSTEEGTSTEPSEGSAP | | | | |
| | GASASGAPSTGGTSESATPESGPGS | | | | |
| | PAGSPTSTEEGSPAGSPTSTEEGSTS | | | | |
| | STAESPGPGSTSESPSGTAPGTSPSG | | | | |
| | ESSTAPGTPGSGTASSSPGSSTPSG | | | | |
| | ATGSPGSSPSASTGTGPGSEPATSG | | | | |
| | SETPGTSESATPESGPGSEPATSGSE | | | | |
| | TPGSTSSTAESPGPGSTSSTAESPGP | | | | |
| | GTSPSGESSTAPGSEPATSGSETPGS | | | | |
| | EPATSGSETPGTSTEPSEGSAPGSTS | | | | |
| | STAESPGPGTSTPESGSASPGSTSES | | | | |
| | PSGTAPGTSTEPSEGSAPGTSTEPSE | | | | |
| | GSAPGTSTEPSEGSAPGSSTPSGAT | | | | |
| | GSPGSSPSASTGTGPGASPGTSSTG | | | | |
| | SPGSEPATSGSETPGTSESATPESGP | | | | |
| | GSPAGSPTSTEEGSSTPSGATGSPG | | | | |
| | SSPSASTGTGPGASPGTSSTGSPGT | | | | |
| | SESATPESGPGTSTEPSEGSAPGTST | | | | |
| | EPSEGSAP | | | | |
| AE912 | MAEPAGSPTSTEEGTPGSGTASSSP | 646 | 913 | Residue totals: H: 8 E: 3 | 99.45% |
| | GSSTPSGATGSPGASPGTSSTGSPG | | | percent: H: 0.9 E: 0.3 | |
| | SPAGSPTSTEEGTSESATPESGPGTS | | | | |
| | TEPSEGSAPGSPAGSPTSTEEGTSTE | | | | |
| | PSEGSAPGTSTEPSEGSAPGTSESA | | | | |
| | TPESGPGSEPATSGSETPGSEPATS | | | | |
| | GSETPGSPAGSPTSTEEGTSESATPE | | | | |
| | SGPGTSTEPSEGSAPGTSTEPSEGS | | | | |
| | APGSPAGSPTSTEEGTSTEPSEGSA | | | | |
| | PGTSTEPSEGSAPGTSESATPESGP | | | | |
| | GTSTEPSEGSAPGTSESATPESGPG | | | | |
| | SEPATSGSETPGTSTEPSEGSAPGTS | | | | |
| | TEPSEGSAPGTSESATPESGPGTSES | | | | |
| | ATPESGPGSPAGSPTSTEEGTSESA | | | | |
| | TPESGPGSEPATSGSETPGTSESATP | | | | |
| | ESGPGTSTEPSEGSAPGTSTEPSEGS | | | | |
| | APGTSTEPSEGSAPGTSTEPSEGSA | | | | |
| | PGTSTEPSEGSAPGTSTEPSEGSAP | | | | |
| | GSPAGSPTSTEEGTSTEPSEGSAPG | | | | |
| | TSESATPESGPGSEPATSGSETPGTS | | | | |
| | ESATPESGPGSEPATSGSETPGTSES | | | | |
| | ATPESGPGTSTEPSEGSAPGTSESA | | | | |
| | TPESGPGSPAGSPTSTEEGSPAGSPT | | | | |
| | STEEGSPAGSPTSTEEGTSESATPES | | | | |
| | GPGTSTEPSEGSAPGTSESATPESG | | | | |
| | PGSEPATSGSETPGTSESATPESGP | | | | |
| | GSEPATSGSETPGTSESATPESGPG | | | | |
| | TSTEPSEGSAPGSPAGSPTSTEEGTS | | | | |
| | ESATPESGPGSEPATSGSETPGTSES | | | | |
| | ATPESGPGSPAGSPTSTEEGSPAGS | | | | |
| | PTSTEEGTSTEPSEGSAPGTSESATP | | | | |
| | ESGPGTSESATPESGPGTSESATPES | | | | |
| | GPGSEPATSGSETPGSEPATSGSET | | | | |
| | PGSPAGSPTSTEEGTSTEPSEGSAP | | | | |
| | GTSTEPSEGSAPGSEPATSGSETPG | | | | |
| | TSESATPESGPGTSTEPSEGSAP | | | | |
| BC 864 | GTSTEPSEPGSAGTSTEPSEPGSAG | 647 | | Residue totals: H: 0 E: 0 | 99.77% |
| | SEPATSGTEPSGSGASEPTSTEPGSE | | | percent: H: 0 E: 0 | |
| | PATSGTEPSGSEPATSGTEPSGSEP | | | | |
| | ATSGTEPSGSGASEPTSTEPGTSTEP | | | | |
| | SEPGSAGSEPATSGTEPSGTSTEPSE | | | | |
| | PGSAGSEPATSGTEPSGSEPATSGT | | | | |
| | EPSGTSTEPSEPGSAGTSTEPSEPGS | | | | |
| | AGSEPATSGTEPSGSEPATSGTEPS | | | | |
| | GTSEPSTSEPGAGSGASEPTSTEPG | | | | |
| | TSEPSTSEPGAGSEPATSGTEPSGSE | | | | |
| | PATSGTEPSGTSTEPSEPGSAGTSTE | | | | |
| | PSEPGSAGSGASEPTSTEPGSEPATS | | | | |
| | GTEPSGSEPATSGTEPSGSEPATSG | | | | |
| | TEPSGSEPATSGTEPSGTSTEPSEPG | | | | |
| | SAGSEPATSGTEPSGSGASEPTSTE | | | | |
| | PGTSTEPSEPGSAGSEPATSGTEPS | | | | |
| | GSGASEPTSTEPGTSTEPSEPGSAG | | | | |
| | SGASEPTSTEPGSEPATSGTEPSGS | | | | |
| | GASEPTSTEPGSEPATSGTEPSGSG | | | | |
| | ASEPTSTEPGTSTEPSEPGSAGSEPA | | | | |
| | TSGTEPSGSGASEPTSTEPGTSTEPS | | | | |
| | EPGSAGSEPATSGTEPSGTSTEPSEP | | | | |
| | GSAGSEPATSGTEPSGTSTEPSEPG | | | | |
| | SAGTSTEPSEPGSAGTSTEPSEPGS | | | | |
| | AGTSTEPSEPGSAGTSTEPSEPGSA | | | | |
| | GTSTEPSEPGSAGTSEPSTSEPGAG | | | | |
| | SGASEPTSTEPGTSTEPSEPGSAGTS | | | | |
| | TEPSEPGSAGTSTEPSEPGSAGSEP | | | | |
| | ATSGTEPSGSGASEPTSTEPGSEPA | | | | |
| | TSGTEPSGSEPATSGTEPSGSEPATS | | | | |
| | GTEPSGSEPATSGTEPSGTSEPSTSE | | | | |
| | PGAGSEPATSGTEPSGSGASEPTST | | | | |
| | EPGTSTEPSEPGSAGSEPATSGTEPS | | | | |
| | GSGASEPTSTEPGTSTEPSEPGSA | | | | |
| | ASPAAPAPASPAAPAPSAPAAAPA | 648 | 84 | Residue totals: H: 58 E: 0 | 78.57% |
| | SPAPAAPSAPAPAAPSAASPAAPSA | | | percent: H: 69.0 E: 0.0 | |
| | PPAAASPAAPSAPPAASAAAPAAA | | | | |
| | SAAASAPSAAA | | | | |

*H: alpha-helix E: beta-sheet

### Example 44

### Analysis of Polypeptide Sequences for Repetitiveness

[0412] Polypeptide amino acid sequences can be assessed for repetitiveness by quantifying the number of times a shorter subsequence appears within the overall polypeptide. For example, a polypeptide of 200 amino acid residues has 192 overlapping 9-amino acid subsequences (or 9-mer “frames”), but the number of unique 9-mer subsequences will depend on the amount of repetitiveness within the sequence. In the present analysis, different sequences were assessed for repetitiveness by summing the occurrence of all unique 3-mer subsequences for each 3-amino acid frame across the first 200 amino acids of the polymer portion divided by the absolute number of unique 3-mer subsequences within the 200 amino acid sequence. The resulting subsequence score is a reflection of the degree of repetitiveness within the polypeptide.

[0413] The results, shown in Table 28, indicate that the unstructured polypeptides consisting of 2 or 3 amino acid types have high subsequence scores, while those of consisting of 12 amino acids motifs of the six amino acids G, S, T, E, P, and A with a low degree of internal repetitiveness, have subsequence scores of less than 10, and in some cases, less than 5. For example, the L288 sequence has two amino acid types and has short, highly repetitive sequences, resulting in a subsequence score of 50.0. The polypeptide J288 has three amino acid types but also has short, repetitive sequences, resulting in a subsequence score of 33.3. Y576 also has three amino acid types, but is not made of internal repeats, reflected in the subsequence score of 15.7 over the first 200 amino acids. W576 consists of four types of amino acids, but has a higher degree of internal repetitiveness, e.g., “GGSG” (SEQ ID NO: 649), resulting in a subsequence score of 23.4. The AD576 consists of four types of 12 amino acid motifs, each consisting of four types of amino acids. Because of the low degree of internal repetitiveness of the individual motifs, the overall subsequence score over the first 200 amino acids is 13.6. In contrast, XTEN's consisting of four motifs contains six types of amino acids, each with a low degree of internal repetitiveness have lower subsequence scores; i.e., AE864 (6.1), AF864 (7.5), and AM875 (4.5).

[0414] Conclusions: The results indicate that the combination of 12 amino acid subsequence motifs, each consisting of four to six amino acid types that are essentially non-repetitive, into a longer XTEN polypeptide results in an overall sequence that is non-repetitive. This is despite the fact that each subsequence motif may be used multiple times across the sequence. In contrast, polymers created from smaller numbers of amino acid types resulted in higher subsequence scores, although the actual sequence can be tailored to reduce the degree of repetitiveness to result in lower subsequence scores.

TABLE 28
Subsequence score calculations of polypeptide sequences

| | | SEQ | |
|---|---|---|---|
| Seq | | ID | |
| Name | Amino Acid Sequence | NO: | Score |
| J288 | GSGGEGGSGGEGGSGGEGGSGGEGGSGGEGGSGGEGGSGGEGGSGGEGGSGGE | 650 | 33.3 |
| | GGSGGEGGSGGEGGSGGEGGSGGEGGSGGEGGSGGEGGSGGEGGSGGEGGSG | | |
| | GEGGSGGEGGSGGEGGSGGEGGSGGEGGSGGEGGSGGEGGSGGEGGSGGEGGS | | |
| | GGEGGSGGEGGSGGEGGSGGEGGSGGEGGSGGEGGSGGEGGSGGEGGSGGEG | | |
| | GSGGEGGSGGEGGSGGEGGSGGEGGSGGEGGSGGEGGSGGEGGSGGEGGSGGE | | |
| | GGSGGEGGSGGEGGSGGEGGSGGEG | | |
| K288 | GEGEGGGEGGEGEGGGEGGEGEGGGEGGEGEGGGEGGEGEGGGEGGEGEGGG | 651 | 46.9 |
| | EGGEGEGGGEGGEGEGGGEGGEGEGGGEGGEGEGGGEGGEGEGGGEGGEGEG | | |
| | GGEGGEGEGGGEGGEGEGGGEGGEGEGGGEGGEGEGGGEGGEGEGGGEGGEG | | |
| | EGGGEGGEGEGGGEGGEGEGGGEGGEGEGGGEGGEGEGGGEGGEGEGGGEGG | | |
| | EGEGGGEGGEGEGGGEGGEGEGGGEGGEGEGGGEGGEGEGGGEGGEGEGGGE | | |
| | GGEGEGGGEGGEGEGGGEGGEGEGGGEG | | |
| L288 | SSESSESSSSESSSESSESSSSESSSESSESSSSESSSESSESSSSESSSESSESSSSESSS | 652 | 50.0 |
| | ESSESSSSESSSESSESSSSESSSESSESSSSESSSESSESSSSESSSESSESSSSESSSES | | |
| | SESSSSESSSESSESSSSESSSESSESSSSESSSESSESSSSESSSESSESSSSESSSESSE | | |
| | SSSSESSSESSESSSSESSSESSESSSSESSSESSESSSSESSSESSESSSSESSSESSESS | | |
| | SSESSSESSESSSSESSSESSESSSSESSSESSESSSSES | | |
| Y288 | GEGSGEGSEGEGSEGSGEGEGSEGSGEGEGGSEGSEGEGGSEGSEGEGGSEGSEG | 653 | 26.8 |
| | EGSGEGSEGEGGSEGSEGEGSGEGSEGEGSEGGSEGEGGSEGSEGEGSGEGSEGE | | |
| | GGEGGSEGEGSEGSGEGEGSGEGSEGEGSEGSGEGEGSGEGSEGEGSEGSGEGE | | |
| | GSEGSGEGEGGSEGSEGEGSEGSGEGEGGEGSGEGEGSGEGSEGEGGGEGSEGE | | |
| | GSGEGGEGEGSEGGSEGEGGSEGGEGEGSEGSGEGEGSEGGSEGEGSEGGSEGE | | |
| | GSEGSGEGEGSEGSGE | | |
| Q576 | GGKPGEGGKPEGGGGKPGGKPEGEGEGKPGGKPEGGGKPGGGEGGKPEGGKPE | 654 | 18.5 |
| | GEGKPGGGEGKPGGKPEGGGGKPEGEGKPGGGGGKPGGKPEGEGKPGGGEGG | | |
| | KPEGKPGEGGEGKPGGKPEGGGEGKPGGGKPGEGGKPGEGKPGGGEGGKPEGG | | |
| | KPEGEGKPGGGEGKPGGKPGEGGKPEGGGEGKPGGKPGEGGEGKPGGGKPEGE | | |
| | GKPGGGKPGGGEGGKPEGEGKPGGKPEGGGEGKPGGKPEGGGKPEGGGEGKP | | |
| | GGGKPGEGGKPGEGEGKPGGKPEGEGKPGGEGGGKPEGKPGGGEGGKPEGGKP | | |
| | GEGGKPEGGKPGEGGEGKPGGGKPGEGGKPEGGGKPEGEGKPGGGGKPGEGG | | |
| | KPEGGKPEGGGEGKPGGGKPEGEGKPGGGEGKPGGKPEGGGGKPGEGGKPEGG | | |
| | KPGGEGGGKPEGEGKPGGKPGEGGGGKPGGKPEGEGKPGEGGEGKPGGKPEGG | | |
| | GEGKPGGKPEGGGEGKPGGGKPGEGGKPEGGGKPGEGGKPGEGGKPEGEGKPG | | |
| | GGEGKPGGKPGEGGKPEGGGEGKPGGKPGGEGGGKPEGGKPGEGGKPEG | | |
| U576 | GEGKPGGKPGSGGGKPGEGGKPGSGEGKPGGKPGSGGSGKPGGKPGEGGKPEG | 655 | 18.1 |
| | GSGGKPGGGGKPGGKPGGEGSGKPGGKPEGGGKPEGGSGGKPGGKPEGGSGG | | |
| | KPGGKPGSGEGGKPGGGKPGGEGKPGSGKPGGEGSGKPGGKPEGGSGGKPGGK | | |
| | PEGGSGGKPGGSGKPGGKPGEGGKPEGGSGGKPGGSGKPGGKPEGGGSGKPGG | | |
| | KPGEGGKPGSGEGGKPGGGKPGGEGKPGSGKPGGEGSGKPGGKPGSGGEGKPG | | |
| | GKPEGGSGGKPGGGKPGGEGKPGSGGKPGEGGKPGSGGGKPGGKPGGEGEGKP | | |
| | GGKPGEGGKPGGEGSGKPGGGGKPGGKPGGEGGKPEGSGKPGGGSGKPGGKPE | | |
| | GGGGKPEGSGKPGGGGKPEGSGKPGGGKPEGGSGGKPGGSGKPGGKPGEGGG | | |
| | KPEGSGKPGGGSGKPGGKPEGGGKPEGGSGGKPGGKPEGGSGGKPGGKPGGEG | | |
| | SGKPGGKPGSGEGGKPGGKPGEGSGGKPGGKPEGGSGGKPGGSGKPGGKPEGG | | |
| | GSGKPGGKPGEGGKPGGEGSGKPGGSGKPG | | |
| W576 | GGSGKPGKPGGSGSGKPGSGKPGGGSGKPGSGKPGGGSGKPGSGKPGGGSGKP | 656 | 23.4 |
| | GSGKPGGGGKPGSGSGKPGGGKPGGSGGKPGGGSGKPGKPGSGGSGKPGSGKP | | |
| | GGGSGGKPGKPGSGGSGGKPGKPGSGGGSGKPGKPGSGGSGGKPGKPGSGGSG | | |
| | GKPGKPGSGGSGKPGSGKPGGGSGKPGSGKPGSGGSGKPGKPGSGGSGKPGSG | | |
| | KPGSGSGKPGSGKPGGGSGKPGSGKPGSGGSGKPGKPGSGGGKPGSGSGKPGG | | |
| | GKPGSGSGKPGGGKPGGSGGKPGGSGGKPGKPGSGGGSGKPGKPGSGGGSGKP | | |
| | GKPGGSGSGKPGSGKPGGGSGKPGSGKPGSGGSGKPGKPGSGGSGGKPGKPGS | | |
| | GGGKPGSGSGKPGGGKPGSGSGKPGGGKPGSGSGKPGGGKPGSGSGKPGGSGK | | |
| | PGSGKPGGGSGGKPGKPGSGGSGKPGSGKPGSGGSGKPGKPGGSGSGKPGSGKP | | |
| | GGGSGKPGSGKPGGGSGKPGSGKPGGGSGKPGSGKPGGGGKPGSGSGKPGGSG | | |
| | GKPGKPGSGGSGGKPGKPGSGGSGKPGSGKPGGGSGGKPGKPGSGG | | |
| Y576 | GEGSGEGSEGEGSEGSGEGEGSEGSGEGEGGSEGSEGEGSEGSGEGEGGEGSGE | 657 | 15.7 |
| | GEGSGEGSEGEGGGEGSEGEGSGEGGEGEGSEGGSEGEGGSEGGEGEGSEGSGE | | |
| | GEGSEGGSEGEGSEGGSEGEGSEGSGEGEGSEGSGEGEGSEGSGEGEGSEGSGEG | | |
| | EGSEGGSEGEGGSEGSEGEGSGEGSEGEGGSEGSEGEGGGEGSEGEGSGEGSEGE | | |
| | GGSEGSEGEGGSEGSEGEGGEGSGEGEGSEGSGEGEGSGEGSEGEGSEGSGEGE | | |
| | GSEGSGEGEGGSEGSEGEGSGEGSEGEGSEGSGEGEGSEGSGEGEGGSEGSEGEG | | |
| | GSEGSEGEGGSEGSEGEGGEGSGEGEGSEGSGEGEGSGEGSEGEGSEGSGEGEGS | | |
| | EGSGEGEGGSEGSEGEGSEGSGEGEGGEGSGEGEGSGEGSEGEGGGEGSEGEGS | | |
| | EGSGEGEGSEGSGEGEGSEGGSEGEGGSEGSEGEGSEGGSEGEGSEGGSEGEGSE | | |
| | GSGEGEGSEGSGEGEGSGEGSEGEGGSEGGEGEGSEGGSEGEGSEGGSEGEGGE | | |
| | GSGEGEGGGEGSEGEGSEGSGEGEGSGEGSE | | |
| AD576 | GSSESGSSEGGPGSGGEPSESGSSGSSESGSSEGGPGSSESGSSEGGPGSSESGSSE | 658 | 13.6 |
| | GGPGSSESGSSEGGPGSSESGSSEGGPGESPGGSSGSESGSEGSSGPGESSGSSESG | | |
| | SSEGGPGSSESGSSEGGPGSSESGSSEGGPGSGGEPSESGSSGESPGGSSGSESGES | | |
| | PGGSSGSESGSGGEPSESGSSGSSESGSSEGGPGSGGEPSESGSSGSGGEPSESGSS | | |
| | GSEGSSGPGESSGESPGGSSGSESGSGGEPSESGSSGSGGEPSESGSSGSGGEPSES | | |
| | GSSGSSESGSSEGGPGESPGGSSGSESGESPGGSSGSESGESPGGSSGSESGESPGG | | |
| | SSGSESGESPGGSSGSESGSSESGSSEGGPGSGGEPSESGSSGSEGSSGPGESSGSSE | | |
| | SGSSEGGPGSGGEPSESGSSGSSESGSSEGGPGSGGEPSESGSSGESPGGSSGSESG | | |
| | ESPGGSSGSESGSSESGSSEGGPGSGGEPSESGSSGSSESGSSEGGPGSGGEPSESG | | |
| | SSGSGGEPSESGSSGESPGGSSGSESGSEGSSGPGESSGSSESGSSEGGPGSEGSSG | | |
| | PGESS | | |
| AE576 | AGSPAGSPTSTEEGTSESATPESGPGTSTEPSEGSAPGSPAGSPTSTEEGTSTEPSE | 659 | 6.1 |
| | GSAPGTSTEPSEGSAPGTSESATPESGPGSEPATSGSETPGSEPATSGSETPGSPAG | | |
| | SPTSTEEGTSESATPESGPGTSTEPSEGSAPGTSTEPSEGSAPGSPAGSPTSTEEGTS | | |
| | TEPSEGSAPGTSTEPSEGSAPGTSESATPESGPGTSTEPSEGSAPGTSESATPESGPG | | |
| | SEPATSGSETPGTSTEPSEGSAPGTSTEPSEGSAPGTSESATPESGPGTSESATPESG | | |
| | PGSPAGSPTSTEEGTSESATPESGPGSEPATSGSETPGTSESATPESGPGTSTEPSEG | | |
| | SAPGTSTEPSEGSAPGTSTEPSEGSAPGTSTEPSEGSAPGTSTEPSEGSAPGTSTEPS | | |
| | EGSAPGSPAGSPTSTEEGTSTEPSEGSAPGTSESATPESGPGSEPATSGSETPGTSES | | |
| | ATPESGPGSEPATSGSETPGTSESATPESGPGTSTEPSEGSAPGTSESATPESGPGSP | | |
| | AGSPTSTEEGSPAGSPTSTEEGSPAGSPTSTEEGTSESATPESGPGTSTEPSEGSAP | | |
| AF540 | GSTSSTAESPGPGSTSSTAESPGPGSTSESPSGTAPGSTSSTAESPGPGSTSSTAESP | 660 | 8.8 |
| | GPGTSTPESGSASPGSTSESPSGTAPGTSPSGESSTAPGSTSESPSGTAPGSTSESPS | | |
| | GTAPGTSPSGESSTAPGSTSESPSGTAPGSTSESPSGTAPGTSPSGESSTAPGSTSES | | |
| | PSGTAPGSTSESPSGTAPGSTSESPSGTAPGTSTPESGSASPGSTSESPSGTAPGTST | | |
| | PESGSASPGSTSSTAESPGPGSTSSTAESPGPGTSTPESGSASPGTSTPESGSASPGS | | |
| | TSESPSGTAPGTSTPESGSASPGTSTPESGSASPGSTSESPSGTAPGSTSESPSGTAP | | |
| | GSTSESPSGTAPGSTSSTAESPGPGTSTPESGSASPGTSTPESGSASPGSTSESPSGT | | |
| | APGSTSESPSGTAPGTSTPESGSASPGSTSESPSGTAPGSTSESPSGTAPGTSTPESG | | |
| | SASPGTSPSGESSTAPGSTSSTAESPGPGTSPSGESSTAPGSTSSTAESPGPGTSTPE | | |
| | SGSASPGSTSESPSGTAP | | |
| AF504 | GASPGTSSTGSPGSSPSASTGTGPGSSPSASTGTGPGTPGSGTASSSPGSSTPSGAT | 661 | 7.0 |
| | GSPGSNPSASTGTGPGASPGTSSTGSPGTPGSGTASSSPGSSTPSGATGSPGTPGSG | | |
| | TASSSPGASPGTSSTGSPGASPGTSSTGSPGTPGSGTASSSPGSSTPSGATGSPGAS | | |
| | PGTSSTGSPGTPGSGTASSSPGSSTPSGATGSPGSNPSASTGTGPGSSPSASTGTGP | | |
| | GSSTPSGATGSPGSSTPSGATGSPGASPGTSSTGSPGASPGTSSTGSPGASPGTSST | | |
| | GSPGTPGSGTASSSPGASPGTSSTGSPGASPGTSSTGSPGASPGTSSTGSPGSSPSA | | |
| | STGTGPGTPGSGTASSSPGASPGTSSTGSPGASPGTSSTGSPGASPGTSSTGSPGSS | | |
| | TPSGATGSPGSSTPSGATGSPGASPGTSSTGSPGTPGSGTASSSPGSSTPSGATGSP | | |
| | GSSTPSGATGSPGSSTPSGATGSPGSSPSASTGTGPGASPGTSSTGSP | | |
| AE864 | GSPAGSPTSTEEGTSESATPESGPGTSTEPSEGSAPGSPAGSPTSTEEGTSTEPSEGS | 662 | 6.1 |
| | APGTSTEPSEGSAPGTSESATPESGPGSEPATSGSETPGSEPATSGSETPGSPAGSP | | |
| | TSTEEGTSESATPESGPGTSTEPSEGSAPGTSTEPSEGSAPGSPAGSPTSTEEGTSTE | | |
| | PSEGSAPGTSTEPSEGSAPGTSESATPESGPGTSTEPSEGSAPGTSESATPESGPGSE | | |
| | PATSGSETPGTSTEPSEGSAPGTSTEPSEGSAPGTSESATPESGPGTSESATPESGPG | | |
| | SPAGSPTSTEEGTSESATPESGPGSEPATSGSETPGTSESATPESGPGTSTEPSEGSA | | |
| | PGTSTEPSEGSAPGTSTEPSEGSAPGTSTEPSEGSAPGTSTEPSEGSAPGTSTEPSEG | | |
| | SAPGSPAGSPTSTEEGTSTEPSEGSAPGTSESATPESGPGSEPATSGSETPGTSESAT | | |
| | PESGPGSEPATSGSETPGTSESATPESGPGTSTEPSEGSAPGTSESATPESGPGSPA | | |
| | GSPTSTEEGSPAGSPTSTEEGSPAGSPTSTEEGTSESATPESGPGTSTEPSEGSAPGT | | |
| | SESATPESGPGSEPATSGSETPGTSESATPESGPGSEPATSGSETPGTSESATPESGP | | |
| | GTSTEPSEGSAPGSPAGSPTSTEEGTSESATPESGPGSEPATSGSETPGTSESATPES | | |
| | GPGSPAGSPTSTEEGSPAGSPTSTEEGTSTEPSEGSAPGTSESATPESGPGTSESATP | | |
| | ESGPGTSESATPESGPGSEPATSGSETPGSEPATSGSETPGSPAGSPTSTEEGTSTEP | | |
| | SEGSAP | | |
| AF864 | GSTSESPSGTAPGTSPSGESSTAPGSTSESPSGTAPGSTSESPSGTAPGTSTPESGSA | 663 | 7.5 |
| | SPGTSTPESGSASPGSTSESPSGTAPGSTSESPSGTAPGTSPSGESSTAPGSTSESPS | | |
| | GTAPGTSPSGESSTAPGTSPSGESSTAPGSTSSTAESPGPGTSPSGESSTAPGTSPSG | | |
| | ESSTAPGSTSSTAESPGPGTSTPESGSASPGTSTPESGSASPGSTSESPSGTAPGSTS | | |
| | ESPSGTAPGTSTPESGSASPGSTSSTAESPGPGTSTPESGSASPGSTSESPSGTAPGT | | |
| | SPSGESSTAPGSTSSTAESPGPGTSPSGESSTAPGTSTPESGSASPGSTSSTAESPGP | | |
| | GSTSSTAESPGPGSTSSTAESPGPGSTSSTAESPGPGTSPSGESSTAPGSTSESPSGT | | |
| | APGSTSESPSGTAPGTSTPESGPXXXGASASGAPSTXXXXSESPSGTAPGSTSESPS | | |
| | GTAPGSTSESPSGTAPGSTSESPSGTAPGSTSESPSGTAPGSTSESPSGTAPGTSTPE | | |
| | SGSASPGTSPSGESSTAPGTSPSGESSTAPGSTSSTAESPGPGTSPSGESSTAPGTST | | |
| | PESGSASPGSTSESPSGTAPGSTSESPSGTAPGTSPSGESSTAPGSTSESPSGTAPGT | | |
| | STPESGSASPGTSTPESGSASPGSTSESPSGTAPGTSTPESGSASPGSTSSTAESPGP | | |
| | GSTSESPSGTAPGSTSESPSGTAPGTSPSGESSTAPGSTSSTAESPGPGTSPSGESST | | |
| | APGTSTPESGSASPGTSPSGESSTAPGTSPSGESSTAPGTSPSGESSTAPGSTSSTAE | | |
| | SPGPGSTSSTAESPGPGTSPSGESSTAPGSSPSASTGTGPGSSTPSGATGSPGSSTPS | | |
| | GATGSP | | |
| AG868 | GGSPGASPGTSSTGSPGSSPSASTGTGPGSSPSASTGTGPGTPGSGTASSSPGSSTP | 664 | 7.5 |
| | SGATGSPGSNPSASTGTGPGASPGTSSTGSPGTPGSGTASSSPGSSTPSGATGSPGT | | |
| | PGSGTASSSPGASPGTSSTGSPGASPGTSSTGSPGTPGSGTASSSPGSSTPSGATGS | | |
| | PGASPGTSSTGSPGTPGSGTASSSPGSSTPSGATGSPGSNPSASTGTGPGSSPSAST | | |
| | GTGPGSSTPSGATGSPGSSTPSGATGSPGASPGTSSTGSPGASPGTSSTGSPGASPG | | |
| | TSSTGSPGTPGSGTASSSPGASPGTSSTGSPGASPGTSSTGSPGASPGTSSTGSPGSS | | |
| | PSASTGTGPGTPGSGTASSSPGASPGTSSTGSPGASPGTSSTGSPGASPGTSSTGSP | | |
| | GSSTPSGATGSPGSSTPSGATGSPGASPGTSSTGSPGTPGSGTASSSPGSSTPSGAT | | |
| | GSPGSSTPSGATGSPGSSTPSGATGSPGSSPSASTGTGPGASPGTSSTGSPGASPGT | | |
| | SSTGSPGTPGSGTASSSPGASPGTSSTGSPGASPGTSSTGSPGASPGTSSTGSPGAS | | |
| | PGTSSTGSPGTPGSGTASSSPGSSTPSGATGSPGTPGSGTASSSPGSSTPSGATGSP | | |
| | GTPGSGTASSSPGSSTPSGATGSPGSSTPSGATGSPGSSPSASTGTGPGSSPSASTG | | |
| | TGPGASPGTSSTGSPGTPGSGTASSSPGSSTPSGATGSPGSSPSASTGTGPGSSPSA | | |
| | STGTGPGASPGTSSTGSPGASPGTSSTGSPGSSTPSGATGSPGSSPSASTGTGPGAS | | |
| | PGTSSTGSPGSSPSASTGTGPGTPGSGTASSSPGSSTPSGATGSPGSSTPSGATGSP | | |
| | GASPGTSSTGSP | | |
| AM875 | GTSTEPSEGSAPGSEPATSGSETPGSPAGSPTSTEEGSTSSTAESPGPGTSTPESGSA | 665 | 4.5 |
| | SPGSTSESPSGTAPGSTSESPSGTAPGTSTPESGSASPGTSTPESGSASPGSEPATSG | | |
| | SETPGTSESATPESGPGSPAGSPTSTEEGTSTEPSEGSAPGTSESATPESGPGTSTEP | | |
| | SEGSAPGTSTEPSEGSAPGSPAGSPTSTEEGTSTEPSEGSAPGTSTEPSEGSAPGTSE | | |
| | SATPESGPGTSESATPESGPGTSTEPSEGSAPGTSTEPSEGSAPGTSESATPESGPGT | | |
| | STEPSEGSAPGSEPATSGSETPGSPAGSPTSTEEGSSTPSGATGSPGTPGSGTASSSP | | |
| | GSSTPSGATGSPGTSTEPSEGSAPGTSTEPSEGSAPGSEPATSGSETPGSPAGSPTST | | |
| | EEGSPAGSPTSTEEGTSTEPSEGSAPGASASGAPSTGGTSESATPESGPGSPAGSPT | | |
| | STEEGSPAGSPTSTEEGSTSSTAESPGPGSTSESPSGTAPGTSPSGESSTAPGTPGSG | | |
| | TASSSPGSSTPSGATGSPGSSPSASTGTGPGSEPATSGSETPGTSESATPESGPGSEP | | |
| | ATSGSETPGSTSSTAESPGPGSTSSTAESPGPGTSPSGESSTAPGSEPATSGSETPGS | | |
| | EPATSGSETPGTSTEPSEGSAPGSTSSTAESPGPGTSTPESGSASPGSTSESPSGTAP | | |
| | GTSTEPSEGSAPGTSTEPSEGSAPGTSTEPSEGSAPGSSTPSGATGSPGSSPSASTGT | | |
| | GPGASPGTSSTGSPGSEPATSGSETPGTSESATPESGPGSPAGSPTSTEEGSSTPSG | | |
| | ATGSPGSSPSASTGTGPGASPGTSSTGSPGTSESATPESGPGTSTEPSEGSAPGTST | | |
| | EPSEGSAP | | |
| AM1318 | GTSTEPSEGSAPGSEPATSGSETPGSPAGSPTSTEEGSTSSTAESPGPGTSTPESGSA | 666 | 4.5 |
| | SPGSTSESPSGTAPGSTSESPSGTAPGTSTPESGSASPGTSTPESGSASPGSEPATSG | | |
| | SETPGTSESATPESGPGSPAGSPTSTEEGTSTEPSEGSAPGTSESATPESGPGTSTEP | | |
| | SEGSAPGTSTEPSEGSAPGSPAGSPTSTEEGTSTEPSEGSAPGTSTEPSEGSAPGTSE | | |
| | SATPESGPGTSESATPESGPGTSTEPSEGSAPGTSTEPSEGSAPGTSESATPESGPGT | | |
| | STEPSEGSAPGSEPATSGSETPGSPAGSPTSTEEGSSTPSGATGSPGTPGSGTASSSP | | |
| | GSSTPSGATGSPGTSTEPSEGSAPGTSTEPSEGSAPGSEPATSGSETPGSPAGSPTST | | |
| | EEGSPAGSPTSTEEGTSTEPSEGSAPGPEPTGPAPSGGSEPATSGSETPGTSESATP | | |
| | ESGPGSPAGSPTSTEEGTSESATPESGPGSPAGSPTSTEEGSPAGSPTSTEEGTSESA | | |
| | TPESGPGSPAGSPTSTEEGSPAGSPTSTEEGSTSSTAESPGPGSTSESPSGTAPGTSP | | |
| | SGESSTAPGSTSESPSGTAPGSTSESPSGTAPGTSPSGESSTAPGTSTEPSEGSAPGT | | |
| | SESATPESGPGTSESATPESGPGSEPATSGSETPGTSESATPESGPGTSESATPESGP | | |
| | GTSTEPSEGSAPGTSESATPESGPGTSTEPSEGSAPGTSPSGESSTAPGTSPSGESST | | |
| | APGTSPSGESSTAPGTSTEPSEGSAPGSPAGSPTSTEEGTSTEPSEGSAPGSSPSAST | | |
| | GTGPGSSTPSGATGSPGSSTPSGATGSPGSSTPSGATGSPGSSTPSGATGSPGASPG | | |
| | TSSTGSPGASASGAPSTGGTSPSGESSTAPGSTSSTAESPGPGTSPSGESSTAPGTS | | |
| | ESATPESGPGTSTEPSEGSAPGTSTEPSEGSAPGSSPSASTGTGPGSSTPSGATGSP | | |
| | GASPGTSSTGSPGTSTPESGSASPGTSPSGESSTAPGTSPSGESSTAPGTSESATPES | | |
| | GPGSEPATSGSETPGTSTEPSEGSAPGSTSESPSGTAPGSTSESPSGTAPGTSTPESG | | |
| | SASPGSPAGSPTSTEEGTSESATPESGPGTSTEPSEGSAPGSPAGSPTSTEEGTSESA | | |
| | TPESGPGSEPATSGSETPGSSTPSGATGSPGASPGTSSTGSPGSSTPSGATGSPGSTS | | |
| | ESPSGTAPGTSPSGESSTAPGSTSSTAESPGPGSSTPSGATGSPGASPGTSSTGSPGT | | |
| | PGSGTASSSPGSPAGSPTSTEEGSPAGSPTSTEEGTSTEPSEGSAP | | |

### Example 45

### Calculation of TEPITOPE Scores

[0415] TEPITOPE scores of 9mer peptide sequence can be calculated by adding pocket potentials as described by Sturniolo [Sturniolo, T., et al. (1999) Nat Biotechnol, 17: 555]. In the present Example, separate Tepitope scores were calculated for individual HLA alleles. Table 29 shows as an example the pocket potentials for HLA*0101B, which occurs in high frequency in the Caucasian population. To calculate the TEPITOPE score of a peptide with sequence P1-P2-P3-P4-P5-P6-P7-P8-P9, the corresponding individual pocket potentials in Table 29 were added. The HLA*0101B score of a 9mer peptide with the sequence FDKLPRTSG (SEQ ID NO: 667) would be the sum of 0, −1.3, 0, 0.9, 0, −1.8, 0.09, 0, 0.

[0416] To evaluate the TEPITOPE scores for long peptides one can repeat the process for all 9mer subsequences of the sequences. This process can be repeated for the proteins encoded by other HLA alleles. Tables 30-33 give pocket potentials for the protein products of HLA alleles that occur with high frequency in the Caucasian population.

[0417] TEPITOPE scores calculated by this method range from approximately −10 to +10. However, 9mer peptides that lack a hydrophobic amino acid (FKLMVWY (SEQ ID NO: 668)) in P1 position have calculated TEPITOPE scores in the range of −1009 to −989. This value is biologically meaningless and reflects the fact that a hydrophobic amino acid serves as an anchor residue for HLA binding and peptides lacking a hydrophobic residue in P1 are considered non binders to HLA. Because most XTEN sequences lack hydrophobic residues, all combinations of 9mer subsequences will have TEPITOPEs in the range in the range of −1009 to −989. This method confirms that XTEN polypeptides may have few or no predicted T-cell epitopes.

TABLE 29
Pocket potential for HLA*0101B allele.

| Amino | | | | | | | | | |
|---|---|---|---|---|---|---|---|---|---|
| Acid | P1 | P2 | P3 | P4 | P5 | P6 | P7 | P8 | P9 |
| A | −999 | 0 | 0 | 0 | — | 0 | 0 | — | 0 |
| C | −999 | 0 | 0 | 0 | — | 0 | 0 | — | 0 |
| D | −999 | −1.3 | −1.3 | −2.4 | — | −2.7 | −2 | — | −1.9 |
| E | −999 | 0.1 | −1.2 | −0.4 | — | −2.4 | −0.6 | — | −1.9 |
| F | 0 | 0.8 | 0.8 | 0.08 | — | −2.1 | 0.3 | — | −0.4 |
| G | −999 | 0.5 | 0.2 | −0.7 | — | −0.3 | −1.1 | — | −0.8 |
| H | −999 | 0.8 | 0.2 | −0.7 | — | −2.2 | 0.1 | — | −1.1 |
| I | −1 | 1.1 | 1.5 | 0.5 | — | −1.9 | 0.6 | — | 0.7 |
| K | −999 | 1.1 | 0 | −2.1 | — | −2 | −0.2 | — | −1.7 |
| L | −1 | 1 | 1 | 0.9 | — | −2 | 0.3 | — | 0.5 |
| M | −1 | 1.1 | 1.4 | 0.8 | — | −1.8 | 0.09 | — | 0.08 |
| N | −999 | 0.8 | 0.5 | 0.04 | — | −1.1 | 0.1 | — | −1.2 |
| P | −999 | −0.5 | 0.3 | −1.9 | — | −0.2 | 0.07 | — | −1.1 |
| Q | −999 | 1.2 | 0 | 0.1 | — | −1.8 | 0.2 | — | −1.6 |
| R | −999 | 2.2 | 0.7 | −2.1 | — | −1.8 | 0.09 | — | −1 |
| S | −999 | −0.3 | 0.2 | −0.7 | — | −0.6 | −0.2 | — | −0.3 |
| T | −999 | 0 | 0 | −1 | — | −1.2 | 0.09 | — | −0.2 |
| V | −1 | 2.1 | 0.5 | −0.1 | — | −1.1 | 0.7 | — | 0.3 |
| W | 0 | −0.1 | 0 | −1.8 | — | −2.4 | −0.1 | — | −1.4 |
| Y | 0 | 0.9 | 0.8 | −1.1 | — | −2 | 0.5 | — | −0.9 |

TABLE 30
Pocket potential for HLA*0301B allele.

| Amino | | | | | | | | | |
|---|---|---|---|---|---|---|---|---|---|
| acid | P1 | P2 | P3 | P4 | P5 | P6 | P7 | P8 | P9 |
| A | −999 | 0 | 0 | 0 | — | 0 | 0 | — | 0 |
| C | −999 | 0 | 0 | 0 | — | 0 | 0 | — | 0 |
| D | −999 | −1.3 | −1.3 | 2.3 | — | −2.4 | −0.6 | — | −0.6 |
| E | −999 | 0.1 | −1.2 | −1 | — | −1.4 | −0.2 | — | −0.3 |
| F | −1 | 0.8 | 0.8 | −1 | — | −1.4 | 0.5 | — | 0.9 |
| G | −999 | 0.5 | 0.2 | 0.5 | — | −0.7 | 0.1 | — | 0.4 |
| H | −999 | 0.8 | 0.2 | 0 | — | −0.1 | −0.8 | — | −0.5 |
| I | 0 | 1.1 | 1.5 | 0.5 | — | 0.7 | 0.4 | — | 0.6 |
| K | −999 | 1.1 | 0 | −1 | — | 1.3 | −0.9 | — | −0.2 |
| L | 0 | 1 | 1 | 0 | — | 0.2 | 0.2 | — | −0 |
| M | 0 | 1.1 | 1.4 | 0 | — | −0.9 | 1.1 | — | 1.1 |
| N | −999 | 0.8 | 0.5 | 0.2 | — | −0.6 | −0.1 | — | −0.6 |
| P | −999 | −0.5 | 0.3 | −1 | — | 0.5 | 0.7 | — | −0.3 |
| Q | −999 | 1.2 | 0 | 0 | — | −0.3 | −0.1 | — | −0.2 |
| R | −999 | 2.2 | 0.7 | −1 | — | 1 | −0.9 | — | 0.5 |
| S | −999 | −0.3 | 0.2 | 0.7 | — | −0.1 | 0.07 | — | 1.1 |
| T | −999 | 0 | 0 | −1 | — | 0.8 | −0.1 | — | −0.5 |
| V | 0 | 2.1 | 0.5 | 0 | — | 1.2 | 0.2 | — | 0.3 |
| W | −1 | −0.1 | 0 | −1 | — | −1.4 | −0.6 | — | −1 |
| Y | −1 | 0.9 | 0.8 | −1 | — | −1.4 | −0.1 | — | 0.3 |

TABLE 31
Pocket potential for HLA*0401B allele.

| Amino | | | | | | | | | |
|---|---|---|---|---|---|---|---|---|---|
| acid | P1 | P2 | P3 | P4 | P5 | P6 | P7 | P8 | P9 |
| A | −999 | 0 | 0 | 0 | — | 0 | 0 | — | 0 |
| C | −999 | 0 | 0 | 0 | — | 0 | 0 | — | 0 |
| D | −999 | −1.3 | −1.3 | 1.4 | — | −1.1 | −0.3 | — | −1.7 |
| E | −999 | 0.1 | −1.2 | 1.5 | — | −2.4 | 0.2 | — | −1.7 |
| F | 0 | 0.8 | 0.8 | −0.9 | — | −1.1 | −1 | — | −1 |
| G | −999 | 0.5 | 0.2 | −1.6 | — | −1.5 | −1.3 | — | −1 |
| H | −999 | 0.8 | 0.2 | 1.1 | — | −1.4 | 0 | — | 0.08 |
| I | −1 | 1.1 | 1.5 | 0.8 | — | −0.1 | 0.08 | — | −0.3 |
| K | −999 | 1.1 | 0 | −1.7 | — | −2.4 | −0.3 | — | −0.3 |
| L | −1 | 1 | 1 | 0.8 | — | −1.1 | 0.7 | — | −1 |
| M | −1 | 1.1 | 1.4 | 0.9 | — | −1.1 | 0.8 | — | −0.4 |
| N | −999 | 0.8 | 0.5 | 0.9 | — | 1.3 | 0.6 | — | −1.4 |
| P | −999 | −0.5 | 0.3 | −1.6 | — | 0 | −0.7 | — | −1.3 |
| Q | −999 | 1.2 | 0 | 0.8 | — | −1.5 | 0 | — | 0.5 |
| R | −999 | 2.2 | 0.7 | −1.9 | — | −2.4 | −1.2 | — | −1 |
| S | −999 | −0.3 | 0.2 | 0.8 | — | 1 | −0.2 | — | 0.7 |
| T | −999 | 0 | 0 | 0.7 | — | 1.9 | −0.1 | — | −1.2 |
| V | −1 | 2.1 | 0.5 | −0.9 | — | 0.9 | 0.08 | — | −0.7 |
| W | 0 | −0.1 | 0 | −1.2 | — | −1 | −1.4 | — | −1 |
| Y | 0 | 0.9 | 0.8 | −1.6 | — | −1.5 | −1.2 | — | −1 |

TABLE 32
Pocket potential for HLA*0701B allele.

| Amino | | | | | | | | | |
|---|---|---|---|---|---|---|---|---|---|
| acid | P1 | P2 | P3 | P4 | P5 | P6 | P7 | P8 | P9 |
| A | −999 | 0 | 0 | 0 | — | 0 | 0 | — | 0 |
| C | −999 | 0 | 0 | 0 | — | 0 | 0 | — | 0 |
| D | −999 | −1.3 | −1.3 | −1.6 | — | −2.5 | −1.3 | — | −1.2 |
| E | −999 | 0.1 | −1.2 | −1.4 | — | −2.5 | 0.9 | — | −0.3 |
| F | 0 | 0.8 | 0.8 | 0.2 | — | −0.8 | 2.1 | — | 2.1 |
| G | −999 | 0.5 | 0.2 | −1.1 | — | −0.6 | 0 | — | −0.6 |
| H | −999 | 0.8 | 0.2 | 0.1 | — | −0.8 | 0.9 | — | −0.2 |
| I | −1 | 1.1 | 1.5 | 1.1 | — | −0.5 | 2.4 | — | 3.4 |
| K | −999 | 1.1 | 0 | −1.3 | — | −1.1 | 0.5 | — | −1.1 |
| L | −1 | 1 | 1 | −0.8 | — | −0.9 | 2.2 | — | 3.4 |
| M | −1 | 1.1 | 1.4 | −0.4 | — | −0.8 | 1.8 | — | 2 |
| N | −999 | 0.8 | 0.5 | −1.1 | — | −0.6 | 1.4 | — | −0.5 |
| P | −999 | −0.5 | 0.3 | −1.2 | — | −0.5 | −0.2 | — | −0.6 |
| Q | −999 | 1.2 | 0 | −1.5 | — | −1.1 | 1.1 | — | −0.9 |
| R | −999 | 2.2 | 0.7 | −1.1 | — | −1.1 | 0.7 | — | −0.8 |
| S | −999 | −0.3 | 0.2 | 1.5 | — | 0.6 | 0.4 | — | −0.3 |
| T | −999 | 0 | 0 | 1.4 | — | −0.1 | 0.9 | — | 0.4 |
| V | −1 | 2.1 | 0.5 | 0.9 | — | 0.1 | 1.6 | — | 2 |
| W | 0 | −0.1 | 0 | −1.1 | — | −0.9 | 1.4 | — | 0.8 |
| Y | 0 | 0.9 | 0.8 | −0.9 | — | −1 | 1.7 | — | 1.1 |

TABLE 33
Pocket potential for HLA*1501B allele.

| Amino | | | | | | | | | |
|---|---|---|---|---|---|---|---|---|---|
| acid | P1 | P2 | P3 | P4 | P5 | P6 | P7 | P8 | P9 |
| A | −999 | 0 | 0 | 0 | — | 0 | 0 | — | 0 |
| C | −999 | 0 | 0 | 0 | — | 0 | 0 | — | 0 |
| D | −999 | −1.3 | −1.3 | −0.4 | — | −0.4 | −0.7 | — | −1.9 |
| E | −999 | 0.1 | −1.2 | −0.6 | — | −1 | −0.7 | — | −1.9 |
| F | −1 | 0.8 | 0.8 | 2.4 | — | −0.3 | 1.4 | — | −0.4 |
| G | −999 | 0.5 | 0.2 | 0 | — | 0.5 | 0 | — | −0.8 |
| H | −999 | 0.8 | 0.2 | 1.1 | — | −0.5 | 0.6 | — | −1.1 |
| I | 0 | 1.1 | 1.5 | 0.6 | — | 0.05 | 1.5 | — | 0.7 |
| K | −999 | 1.1 | 0 | −0.7 | — | −0.3 | −0.3 | — | −1.7 |
| L | 0 | 1 | 1 | 0.5 | — | 0.2 | 1.9 | — | 0.5 |
| M | 0 | 1.1 | 1.4 | 1 | — | 0.1 | 1.7 | — | 0.08 |
| N | −999 | 0.8 | 0.5 | −0.2 | — | 0.7 | 0.7 | — | −1.2 |
| P | −999 | −0.5 | 0.3 | −0.3 | — | −0.2 | 0.3 | — | −1.1 |
| Q | −999 | 1.2 | 0 | −0.8 | — | −0.8 | −0.3 | — | −1.6 |
| R | −999 | 2.2 | 0.7 | 0.2 | — | 1 | −0.5 | — | −1 |
| S | −999 | −0.3 | 0.2 | −0.3 | — | 0.6 | 0.3 | — | −0.3 |
| T | −999 | 0 | 0 | −0.3 | — | −0 | 0.2 | — | −0.2 |
| V | 0 | 2.1 | 0.5 | 0.2 | — | −0.3 | 0.3 | — | 0.3 |
| W | −1 | −0.1 | 0 | 0.4 | — | −0.4 | 0.6 | — | −1.4 |
| Y | −1 | 0.9 | 0.8 | 2.5 | — | 0.4 | 0.7 | — | −0.9 |

TABLE 34
Exemplary Biological Activity, Exemplary Assays and Preferred Indications

| Biologically Active | | Exemplary Activity | |
|---|---|---|---|
| Protein | Biological Activity | Assay | Preferred Indication: |
| Insulin-like | IGF-1 is a pleiotropic | IGF-1 activity may be | Diabetes mellitus; Growth |
| growth | polypeptide with a | assayed in vitro using | disorders; Frailty; |
| factor-1 | wide range of actions | an serum withdrawal | Amyotrophic lateral |
| (Mecasermin; | in both | apoptosis-protection | sclerosis; Osteoarthritis; |
| Somazon; IGF-1; | central and | assay. (J Endocrinol | Kidney disease & |
| IGF-1 | peripheral | 2000 October; 167(1): | neuropathy; Dwarfism; HIV- |
| complex; CEP | nervous sytems. It is | 165-74). Proliferation | 1 infections; Myocardial |
| 151; | involved in growth | assay using breast | ischaemia; Osteoporosis; |
| CGP 35126; FK | and | carcinoma cell | Multiple sclerosis; Nerve |
| 780; | development and | line MCF-7 (Karey | disorders; Burns; diabetes; |
| Mecar, RHIGF-1; | protects neurons | 1988 | peripheral |
| Somatomedin-1; | against cell death via | Cancer Res. 48: | |
| Somatomedin-C; | the activation of | 4083) | |
| SOMATOKINE; | intracellular | | |
| MYOTROPHIN; | pathways | | |
| IGEF; | implicating | | |
| DepoIGF-1) | phosphatidylinositide | | |
| | 3/Akt kinase. | | |
| Human growth | Binds to two GHR | 1) Ba/F3-hGHR | Acromegaly; Growth failure; |
| hormone | molecules and | proliferation assay, a | Growth hormone |
| (Pegvisamont; | Induces signal | novel specific | replacement; Growth |
| Somatrem; | transduction through | bioassay for serum | hormone deficiency; |
| Somatropin; | receptor dimerization | human growth | Pediatric Growth Hormone |
| TROVERT; | | hormone. J Clin | Deficiency; Adult Growth |
| PROTROPIN; | | Endocrinol Metab | Hormone Deficiency; |
| BIO-TROPIN; | | 2000 November; 85(11): | Idiopathic Growth Hormone |
| HUMATROPE; | | 4274-9 Plasma | Deficiency; Growth |
| NUTROPIN; | | growth hormone (GH) | retardation; Prader- |
| NUTROPINAQ; | | immunoassay and | Willi Syndrome; Prader-Willi |
| NUTROPHIN; | | tibial bioassay, Appl | Syndrome in children 2 |
| NORDITROPIN; | | Physiol (2000) 89(6): | years or older; Growth |
| GENOTROPIN; | | 2174-8. | deficiencies; Growth failure |
| SAIZEN; | | Growth hormone | associated with chronic |
| SEROSTIM) | | (hGH) receptor | renal insufficiency; |
| | | mediated cell | Osteoporosis; |
| | | mediated | Postmenopausal |
| | | proliferation, Growth | osteoporosis; Osteopenia, |
| | | Horm IGF Res 2000 | Osteoclastogenesis; burns; |
| | | October; 10(5): 248-55 | Cachexia; Cancer |
| | | International standard | Cachexia; Dwarfism; |
| | | for growth hormone, | Metabolic Disorders; |
| | | Horm Res 1999; 51 | Obesity; Renal failure; |
| | | Suppl 1: 7-12 | Turner's Syndrome; |
| | | 2) Detection of human | Fibromyalgia, Fracture |
| | | growth hormone | treatment; Frailty, AIDS |
| | | detected by direct | wasting; Muscle Wasting; |
| | | radioimmunoassay | Short Stature; Diagnostic |
| | | performed on serial | Agents; Female Infertility; |
| | | dilutions of lysed cell | lipodystrophy. |
| | | supernatants using | |
| | | the Phadebas HGH | |
| | | PRIST kit (Farmacia). | |
| | | U.S. Pat. No. | |
| | | 4,898,830 | |

TABLE 35
Exemplary GHXTEN comprising growth hormones and single XTEN

| | | SEQ | | SEQ |
|---|---|---|---|---|
| GHXTEN | | ID | | ID |
| Name* | Amino Acid Sequence | NO: | DNA Nucleotide Sequence | NO: |
| AE48- | MAEPAGSPTSTEEGTPGSG | 669 | ATGGCTGAACCTGCTGGCTCTCCAACCTCCACTGAG | 670 |
| hGH | TASSSPGSSTPSGATGSPG | | GAAGGTACCCCGGGTAGCGGTACTGCTTCTTCCTCTC | |
| | ASPGTSSTGSPGFPTIPLSR | | CAGGTAGCTCTACCCCTTCTGGTGCAACCGGCTCTCC | |
| | LFDNAMLRAHRLHQLAFD | | AGGTGCTTCTCCGGGCACCAGCTCTACCGGTTCTCCA | |
| | TYQEFEEAYIPKEQKYSFL | | GGTTTTCCGACTATTCCGCTGTCTCGTCTGTTTGATA | |
| | QNPQTSLCFSESIPTPSNRE | | ATGCTATGCTGCGTGCGCACCGTCTGCACCAGCTGG | |
| | ETQQKSNLELLRISLLLIQS | | CCTTTGATACTTACCAGGAATTTGAAGAAGCcTACAT | |
| | WLEPVQFLRSVFANSLVY | | TCCTAAAGAGCAGAAGTACTCTTTCCTGCAAAACCC | |
| | GASDSNVYDLLKDLEEGI | | ACAGACTTCTCTCTGCTTCAGCGAATCTATTCCGACG | |
| | QTLMGRLEDGSPRTGQIFK | | CCTTCCAATCGCGAGGAAACTCAGCAAAAGTCCAAT | |
| | QTYSKFDTNSHNDDALLK | | CTGGAACTACTCCGCATTTCTCTGCTTCTGATTCAGA | |
| | NYGLLYCFRKDMDKVETF | | GCTGGCTAGAACCAGTGCAATTTCTGCGTTCCGTCTT | |
| | LRIVQCRSVEGSCGF | | CGCCAATAGCCTAGTTTATGGCGCATCCGACAGCAA | |
| | | | CGTATACGATCTCCTGAAAGATCTCGAGGAAGGCAT | |
| | | | TCAGACCCTGATGGGTCGTCTCGAGGATGGCTCTCC | |
| | | | GCGTACTGGTCAGATCTTCAAGCAGACTTACTCTAA | |
| | | | ATTTGATACTAACAGCCACAATGACGATGCGCTTCT | |
| | | | AAAAAACTATGGTCTGCTGTATTGTTTTCGTAAAGAT | |
| | | | ATGGACAAAGTTGAAACCTTCCTGCGTATTGTTCAGT | |
| | | | GTCGTTCCGTTGAGGGCAGCTGTGGTTTCTAA | |
| AM48- | MAEPAGSPTSTEEGASPGT | 671 | ATGGCTGAACCTGCTGGCTCTCCAACCTCCACTGAG | 672 |
| hGH | SSTGSPGSSTPSGATGSPGS | | GAAGGTGCATCCCCGGGCACCAGCTCTACCGGTTCT | |
| | STPSGATGSPGFPTIPLSRL | | CCAGGTAGCTCTACCCCGTCTGGTGCTACCGGCTCTC | |
| | FDNAMLRAHRLHQLAFDT | | CAGGTAGCTCTACCCCGTCTGGTGCTACTGGCTCTCC | |
| | YQEFEEAYIPKEQKYSFLQ | | AGGTTTTCCGACTATTCCGCTGTCTCGTCTGTTTGAT | |
| | NPQTSLCFSESIPTPSNREE | | AATGCTATGCTGCGTGCGCACCGTCTGCACCAGCTG | |
| | TQQKSNLELLRISLLLIQS | | GCCTTTGATACTTACCAGGAATTTGAAGAAGCcTACA | |
| | WLEPVQFLRSVFANSLVY | | TTCCTAAAGAGCAGAAGTACTCTTTCCTGCAAAACC | |
| | GASDSNVYDLLKDLEEGI | | CACAGACTTCTCTCTGCTTCAGCGAATCTATTCCGAC | |
| | QTLMGRLEDGSPRTGQIFK | | GCCTTCCAATCGCGAGGAAACTCAGCAAAAGTCCAA | |
| | QTYSKFDTNSHNDDALLK | | TCTGGAACTACTCCGCATTTCTCTGCTTCTGATTCAG | |
| | NYGLLYCFRKDMDKVETF | | AGCTGGCTAGAACCAGTGCAATTTCTGCGTTCCGTCT | |
| | LRIVQCRSVEGSCGF | | TCGCCAATAGCCTAGTTTATGGCGCATCCGACAGCA | |
| | | | ACGTATACGATCTCCTGAAAGATCTCGAGGAAGGCA | |
| | | | TTCAGACCCTGATGGGTCGTCTCGAGGATGGCTCTCC | |
| | | | GCGTACTGGTCAGATCTTCAAGCAGACTTACTCTAA | |
| | | | ATTTGATACTAACAGCCACAATGACGATGCGCTTCT | |
| | | | AAAAAACTATGGTCTGCTGTATTGTTTTCGTAAAGAT | |
| | | | ATGGACAAAGTTGAAACCTTCCTGCGTATTGTTCAGT | |
| | | | GTCGTTCCGTTGAGGGCAGCTGTGGTTTCTAA | |
| AE144- | GSEPATSGSETPGTSESATP | 673 | GGTAGCGAACCGGCAACTTCCGGCTCTGAAACCCCA | 674 |
| hGH | ESGPGSEPATSGSETPGSPA | | GGTACTTCTGAAAGCGCTACTCCTGAGTCTGGCCCA | |
| | GSPTSTEEGTSTEPSEGSAP | | GGTAGCGAACCTGCTACCTCTGGCTCTGAAACCCCA | |
| | GSEPATSGSETPGSEPATS | | GGTAGCCCGGCAGGCTCTCCGACTTCCACCGAGGAA | |
| | GSETPGSEPATSGSETPGTS | | GGTACCTCTACTGAACCTTCTGAGGGTAGCGCTCCA | |
| | TEPSEGSAPGTSESATPESG | | GGTAGCGAACCGGCAACCTCTGGCTCTGAAACCCCA | |
| | PGSEPATSGSETPGTSTEPS | | GGTAGCGAACCTGCTACCTCCGGCTCTGAAACTCCA | |
| | EGSAPGFPTIPLSRLFDNA | | GGTAGCGAACCGGCTACTTCCGGTTCTGAAACTCCA | |
| | MLRAHRLHQLAFDTYQEF | | GGTACCTCTACCGAACCTTCCGAAGGCAGCGCACCA | |
| | EEAYIPKEQKYSFLQNPQT | | GGTACTTCTGAAAGCGCAACCCCTGAATCCGGTCCA | |
| | SLCFSESIPTPSNREETQQK | | GGTAGCGAACCGGCTACTTCTGGCTCTGAGACTCCA | |
| | SNLELLRISLLLIQSWLEPV | | GGTACTTCTACCGAACCGTCCGAAGGTAGCGCACCA | |
| | QFLRSVFANSLVYGASDS | | GGTTTTCCGACTATTCCGCTGTCTCGTCTGTTTGATA | |
| | NVYDLLKDLEEGIQTLMG | | ATGCTATGCTGCGTGCGCACCGTCTGCACCAGCTGG | |
| | RLEDGSPRTGQIFKQTYSK | | CCTTTGATACTTACCAGGAATTTGAAGAAGCcTACAT | |
| | FDTNSHNDDALLKNYGLL | | TCCTAAAGAGCAGAAGTACTCTTTCCTGCAAAACCC | |
| | YCFRKDMDKVETFLRIVQ | | ACAGACTTCTCTCTGCTTCAGCGAATCTATTCCGACG | |
| | CRSVEGSCGF | | CCTTCCAATCGCGAGGAAACTCAGCAAAAGTCCAAT | |
| | | | CTGGAACTACTCCGCATTTCTCTGCTTCTGATTCAGA | |
| | | | GCTGGCTAGAACCAGTGCAATTTCTGCGTTCCGTCTT | |
| | | | CGCCAATAGCCTAGTTTATGGCGCATCCGACAGCAA | |
| | | | CGTATACGATCTCCTGAAAGATCTCGAGGAAGGCAT | |
| | | | TCAGACCCTGATGGGTCGTCTCGAGGATGGCTCTCC | |
| | | | GCGTACTGGTCAGATCTTCAAGCAGACTTACTCTAA | |
| | | | ATTTGATACTAACAGCCACAATGACGATGCGCTTCT | |
| | | | AAAAAACTATGGTCTGCTGTATTGTTTTCGTAAAGAT | |
| | | | ATGGACAAAGTTGAAACCTTCCTGCGTATTGTTCAGT | |
| | | | GTCGTTCCGTTGAGGGCAGCTGTGGTTTCTAA | |
| AE288- | GTSESATPESGPGSEPATS | 675 | GGTACCTCTGAAAGCGCAACTCCTGAGTCTGGCCCA | 676 |
| hGH | GSETPGTSESATPESGPGSE | | GGTAGCGAACCTGCTACCTCCGGCTCTGAGACTCCA | |
| | PATSGSETPGTSESATPESG | | GGTACCTCTGAAAGCGCAACCCCGGAATCTGGTCCA | |
| | PGTSTEPSEGSAPGSPAGSP | | GGTAGCGAACCTGCAACCTCTGGCTCTGAAACCCCA | |
| | TSTEEGTSESATPESGPGSE | | GGTACCTCTGAAAGCGCTACTCCTGAATCTGGCCCA | |
| | PATSGSETPGTSESATPESG | | GGTACTTCTACTGAACCGTCCGAGGGCAGCGCACCA | |
| | PGSPAGSPTSTEEGSPAGSP | | GGTAGCCCTGCTGGCTCTCCAACCTCCACCGAAGAA | |
| | TSTEEGTSTEPSEGSAPGTS | | GGTACCTCTGAAAGCGCAACCCCTGAATCCGGCCCA | |
| | ESATPESGPGTSESATPESG | | GGTAGCGAACCGGCAACCTCCGGTTCTGAAACCCCA | |
| | PGTSESATPESGPGSEPATS | | GGTACTTCTGAAAGCGCTACTCCTGAGTCCGGCCCA | |
| | GSETPGSEPATSGSETPGSP | | GGTAGCCCGGCTGGCTCTCCGACTTCCACCGAGGAA | |
| | AGSPTSTEEGTSTEPSEGSA | | GGTAGCCCGGCTGGCTCTCCAACTTCTACTGAAGAA | |
| | PGTSTEPSEGSAPGSEPATS | | GGTACTTCTACCGAACCTTCCGAGGGCAGCGCACCA | |
| | GSETPGTSESATPESGPGTS | | GGTACTTCTGAAAGCGCTACCCCTGAGTCCGGCCCA | |
| | TEPSEGSAPGFPTIPLSRLF | | GGTACTTCTGAAAGCGCTACTCCTGAATCCGGTCCA | |
| | DNAMLRAHRLHQLAFDT | | GGTACTTCTGAAAGCGCTACCCCGGAATCTGGCCCA | |
| | YQEFEEAYIPKEQKYSFLQ | | GGTAGCGAACCGGCTACTTCTGGTTCTGAAACCCCA | |
| | NPQTSLCFSESIPTPSNREE | | GGTAGCGAACCGGCTACCTCCGGTTCTGAAACTCCA | |
| | TQQKSNLELLRISLLLIQS | | GGTAGCCCAGCAGGCTCTCCGACTTCCACTGAGGAA | |
| | WLEPVQFLRSVFANSLVY | | GGTACTTCTACTGAACCTTCCGAAGGCAGCGCACCA | |
| | GASDSNVYDLLKDLEEGI | | GGTACCTCTACTGAACCTTCTGAGGGCAGCGCTCCA | |
| | QTLMGRLEDGSPRTGQIFK | | GGTAGCGAACCTGCAACCTCTGGCTCTGAAACCCCA | |
| | QTYSKFDTNSHNDDALLK | | GGTACCTCTGAAAGCGCTACTCCTGAATCTGGCCCA | |
| | NYGLLYCFRKDMDKVETF | | GGTACTTCTACTGAACCGTCCGAGGGCAGCGCACCA | |
| | LRIVQCRSVEGSCGF | | GGTTTTCCGACTATTCCGCTGTCTCGTCTGTTTGATA | |
| | | | ATGCTATGCTGCGTGCGCACCGTCTGCACCAGCTGG | |
| | | | CCTTTGATACTTACCAGGAATTTGAAGAAGCcTACAT | |
| | | | TCCTAAAGAGCAGAAGTACTCTTTCCTGCAAAACCC | |
| | | | ACAGACTTCTCTCTGCTTCAGCGAATCTATTCCGACG | |
| | | | CCTTCCAATCGCGAGGAAACTCAGCAAAAGTCCAAT | |
| | | | CTGGAACTACTCCGCATTTCTCTGCTTCTGATTCAGA | |
| | | | GCTGGCTAGAACCAGTGCAATTTCTGCGTTCCGTCTT | |
| | | | CGCCAATAGCCTAGTTTATGGCGCATCCGACAGCAA | |
| | | | CGTATACGATCTCCTGAAAGATCTCGAGGAAGGCAT | |
| | | | TCAGACCCTGATGGGTCGTCTCGAGGATGGCTCTCC | |
| | | | GCGTACTGGTCAGATCTTCAAGCAGACTTACTCTAA | |
| | | | ATTTGATACTAACAGCCACAATGACGATGCGCTTCT | |
| | | | AAAAAACTATGGTCTGCTGTATTGTTTTCGTAAAGAT | |
| | | | ATGGACAAAGTTGAAACCTTCCTGCGTATTGTTCAGT | |
| | | | GTCGTTCCGTTGAGGGCAGCTGTGGTTTCTAA | |
| AF144- | GTSTPESGSASPGTSPSGES | 677 | GGTACTTCTACTCCGGAAAGCGGTTCCGCATCTCCA | 678 |
| hGH | STAPGTSPSGESSTAPGSTS | | GGTACTTCTCCTAGCGGTGAATCTTCTACTGCTCCAG | |
| | STAESPGPGSTSESPSGTAP | | GTACCTCTCCTAGCGGCGAATCTTCTACTGCTCCAGG | |
| | GSTSSTAESPGPGTSPSGES | | TTCTACCAGCTCTACCGCTGAATCTCCTGGCCCAGGT | |
| | STAPGTSTPESGSASPGSTS | | TCTACCAGCGAATCCCCGTCTGGCACCGCACCAGGT | |
| | STAESPGPGTSPSGESSTAP | | TCTACTAGCTCTACCGCAGAATCTCCGGGTCCAGGT | |
| | GTSPSGESSTAPGTSPSGES | | ACTTCCCCTAGCGGTGAATCTTCTACTGCTCCAGGTA | |
| | STAPGFPTIPLSRLFDNAM | | CCTCTACTCCGGAAAGCGGCTCCGCATCTCCAGGTTC | |
| | LRAHRLHQLAFDTYQEFE | | TACTAGCTCTACTGCTGAATCTCCTGGTCCAGGTACC | |
| | EAYIPKEQKYSFLQNPQTS | | TCCCCTAGCGGCGAATCTTCTACTGCTCCAGGTACCT | |
| | LCFSESIPTPSNREETQQKS | | CTCCTAGCGGCGAATCTTCTACCGCTCCAGGTACCTC | |
| | NLELLRISLLLIQSWLEPVQ | | CCCTAGCGGTGAATCTTCTACCGCACCAGGTTTTCCG | |
| | FLRSVFANSLVYGASDSN | | ACTATTCCGCTGTCTCGTCTGTTTGATAATGCTATGC | |
| | VYDLLKDLEEGIQTLMGR | | TGCGTGCGCACCGTCTGCACCAGCTGGCCTTTGATAC | |
| | LEDGSPRTGQIFKQTYSKF | | TTACCAGGAATTTGAAGAAGCcTACATTCCTAAAGA | |
| | DTNSHNDDALLKNYGLLY | | GCAGAAGTACTCTTTCCTGCAAAACCCACAGACTTC | |
| | CFRKDMDKVETFLRIVQC | | TCTCTGCTTCAGCGAATCTATTCCGACGCCTTCCAAT | |
| | RSVEGSCGF | | CGCGAGGAAACTCAGCAAAAGTCCAATCTGGAACTA | |
| | | | CTCCGCATTTCTCTGCTTCTGATTCAGAGCTGGCTAG | |
| | | | AACCAGTGCAATTTCTGCGTTCCGTCTTCGCCAATAG | |
| | | | CCTAGTTTATGGCGCATCCGACAGCAACGTATACGA | |
| | | | TCTCCTGAAAGATCTCGAGGAAGGCATTCAGACCCT | |
| | | | GATGGGTCGTCTCGAGGATGGCTCTCCGCGTACTGG | |
| | | | TCAGATCTTCAAGCAGACTTACTCTAAATTTGATACT | |
| | | | AACAGCCACAATGACGATGCGCTTCTAAAAAACTAT | |
| | | | GGTCTGCTGTATTGTTTTCGTAAAGATATGGACAAA | |
| | | | GTTGAAACCTTCCTGCGTATTGTTCAGTGTCGTTCCG | |
| | | | TTGAGGGCAGCTGTGGTTTCTAA | |
| AD576- | GSSESGSSEGGPGSGGEPS | 679 | GGTTCCTCTGAAAGCGGTTCTTCCGAAGGTGGTCCA | 680 |
| hGH | ESGSSGSSESGSSEGGPGSS | | GGTTCCTCTGAAAGCGGTTCTTCTGAGGGTGGTCCA | |
| | ESGSSEGGPGSSESGSSEG | | GGTGAATCTCCGGGTGGCTCCAGCGGTTCCGAGTCA | |
| | GPGSSESGSSEGGPGSSES | | GGTTCTGGTGGCGAACCTTCCGAGTCTGGTAGCTCA | |
| | GSSEGGPGESPGGSSGSES | | GGTGAATCTCCGGGTGGTTCTAGCGGTTCCGAGTCA | |
| | GSEGSSGPGESSGSSESGSS | | GGTGAATCTCCGGGTGGTTCCAGCGGTTCTGAGTCA | |
| | EGGPGSSESGSSEGGPGSS | | GGTTCCTCCGAAAGCGGTTCTTCTGAGGGCGGTCCA | |
| | ESGSSEGGPGSGGEPSESG | | GGTTCCTCCGAAAGCGGTTCTTCCGAGGGCGGTCCA | |
| | SSGESPGGSSGSESGESPG | | GGTTCTTCTGAAAGCGGTTCTTCCGAGGGCGGTCCA | |
| | GSSGSESGSGGEPSESGSS | | GGTGAATCTCCTGGTGGTTCCAGCGGTTCCGAGTCA | |
| | GSSESGSSEGGPGSGGEPS | | GGTGAATCTCCAGGTGGCTCTAGCGGTTCCGAGTCA | |
| | ESGSSGSGGEPSESGSSGSE | | GGTGAATCTCCTGGTGGTTCTAGCGGTTCTGAATCAG | |
| | GSSGPGESSGESPGGSSGS | | GTTCCTCCGAAAGCGGTTCTTCTGAGGGCGGTCCAG | |
| | ESGSGGEPSESGSSGSGGE | | GTTCCTCCGAAAGCGGTTCTTCCGAGGGCGGTCCAG | |
| | PSESGSSGSGGEPSESGSSG | | GTTCTTCTGAAAGCGGTTCTTCCGAGGGCGGTCCAG | |
| | SSESGSSEGGPGESPGGSS | | GTTCCTCTGAAAGCGGTTCTTCTGAGGGCGGTCCAG | |
| | GSESGESPGGSSGSESGESP | | GTTCTTCCGAAAGCGGTTCTTCCGAGGGCGGTCCAG | |
| | GGSSGSESGESPGGSSGSE | | GTTCTTCCGAAAGCGGTTCTTCTGAAGGCGGTCCAG | |
| | SGESPGGSSGSESGSSESGS | | GTTCTGGTGGCGAACCGTCCGAGTCTGGTAGCTCAG | |
| | SEGGPGSGGEPSESGSSGS | | GTGAATCTCCGGGTGGCTCTAGCGGTTCCGAGTCAG | |
| | EGSSGPGESSGSSESGSSEG | | GTGAATCTCCTGGTGGTTCCAGCGGTTCCGAGTCAG | |
| | GPGSGGEPSESGSSGSSES | | GTTCCGGTGGCGAACCGTCCGAATCTGGTAGCTCAG | |
| | GSSEGGPGSGGEPSESGSS | | GTAGCGAAGGTTCTTCTGGTCCAGGCGAATCTTCAG | |
| | GESPGGSSGSESGESPGGS | | GTTCCTCTGAAAGCGGTTCTTCTGAGGGCGGTCCAG | |
| | SGSESGSSESGSSEGGPGS | | GTTCCGGTGGCGAACCGTCCGAATCTGGTAGCTCAG | |
| | GGEPSESGSSGSSESGSSEG | | GTAGCGAAGGTTCTTCTGGTCCAGGCGAATCTTCAG | |
| | GPGSGGEPSESGSSGSGGE | | GTTCCTCTGAAAGCGGTTCTTCTGAGGGCGGTCCAG | |
| | PSESGSSGESPGGSSGSESG | | GTTCCGGTGGCGAACCTTCCGAATCTGGTAGCTCAG | |
| | SEGSSGPGESSGSSESGSSE | | GTGAATCTCCGGGTGGTTCTAGCGGTTCTGAGTCAG | |
| | GGPGSEGSSGPGESSGFPTI | | GTTCTGGTGGTGAACCTTCCGAGTCTGGTAGCTCAG | |
| | PLSRLFDNAMLRAHRLHQ | | GTTCTGGTGGCGAACCATCCGAGTCTGGTAGCTCAG | |
| | LAFDTYQEFEEAYIPKEQK | | GTTCTTCCGAAAGCGGTTCTTCCGAAGGCGGTCCAG | |
| | YSFLQNPQTSLCFSESIPTP | | GTTCTGGTGGTGAACCGTCCGAATCTGGTAGCTCAG | |
| | SNREETQQKSNLELLRISL | | GTTCTGGTGGCGAACCATCCGAATCTGGTAGCTCAG | |
| | LLIQSWLEPVQFLRSVFAN | | GTAGCGAAGGTTCTTCTGGTCCTGGCGAATCTTCAG | |
| | SLVYGASDSNVYDLLKDL | | GTGAATCTCCAGGTGGCTCTAGCGGTTCCGAATCAG | |
| | EEGIQTLMGRLEDGSPRTG | | GTAGCGAAGGTTCTTCCGGTCCAGGTGAATCTTCAG | |
| | QIFKQTYSKFDTNSHNDD | | GTAGCGAAGGTTCTTCTGGTCCTGGTGAATCCTCAG | |
| | ALLKNYGLLYCFRKDMD | | GTTCCGGTGGCGAACCATCTGAATCTGGTAGCTCAG | |
| | KVETFLRIVQCRSVEGSCGF | | GTTCCTCTGAAAGCGGTTCTTCCGAAGGTGGTCCAG | |
| | | | GTTCCTCTGAAAGCGGTTCTTCTGAGGGTGGTCCAG | |
| | | | GTGAATCTCCGGGTGGCTCCAGCGGTTCCGAGTCAG | |
| | | | GTTCTGGTGGCGAACCATCCGAATCTGGTAGCTCAG | |
| | | | GTAGCGAAGGTTCTTCTGGTCCTGGCGAATCTTCAG | |
| | | | GTGAATCTCCAGGTGGCTCTAGCGGTTCCGAATCAG | |
| | | | GTAGCGAAGGTTCTTCCGGTCCTGGTGAGTCTTCAG | |
| | | | GTGAATCTCCAGGTGGCTCTAGCGGTTCCGAGTCAG | |
| | | | GTAGCGAAGGTTCTTCTGGTCCTGGCGAGTCCTCAG | |
| | | | GTTTTCCGACTATTCCGCTGTCTCGTCTGTTTGATAA | |
| | | | TGCTATGCTGCGTGCGCACCGTCTGCACCAGCTGGC | |
| | | | CTTTGATACTTACCAGGAATTTGAAGAAGCcTACATT | |
| | | | CCTAAAGAGCAGAAGTACTCTTTCCTGCAAAACCCA | |
| | | | CAGACTTCTCTCTGCTTCAGCGAATCTATTCCGACGC | |
| | | | CTTCCAATCGCGAGGAAACTCAGCAAAAGTCCAATC | |
| | | | TGGAACTACTCCGCATTTCTCTGCTTCTGATTCAGAG | |
| | | | CTGGCTAGAACCAGTGCAATTTCTGCGTTCCGTCTTC | |
| | | | GCCAATAGCCTAGTTTATGGCGCATCCGACAGCAAC | |
| | | | GTATACGATCTCCTGAAAGATCTCGAGGAAGGCATT | |
| | | | CAGACCCTGATGGGTCGTCTCGAGGATGGCTCTCCG | |
| | | | CGTACTGGTCAGATCTTCAAGCAGACTTACTCTAAAT | |
| | | | TTGATACTAACAGCCACAATGACGATGCGCTTCTAA | |
| | | | AAAACTATGGTCTGCTGTATTGTTTTCGTAAAGATAT | |
| | | | GGACAAAGTTGAAACCTTCCTGCGTATTGTTCAGTGT | |
| | | | CGTTCCGTTGAGGGCAGCTGTGGTTTCTAA | |
| AE576- | GSPAGSPTSTEEGTSESATP | 681 | GGTAGCCCGGCTGGCTCTCCTACCTCTACTGAGGAA | 682 |
| hGH | ESGPGTSTEPSEGSAPGSPA | | GGTACTTCTGAAAGCGCTACTCCTGAGTCTGGTCCA | |
| | GSPTSTEEGTSTEPSEGSAP | | GGTACCTCTACTGAACCGTCCGAAGGTAGCGCTCCA | |
| | GTSTEPSEGSAPGTSESATP | | GGTAGCCCAGCAGGCTCTCCGACTTCCACTGAGGAA | |
| | ESGPGSEPATSGSETPGSEP | | GGTACTTCTACTGAACCTTCCGAAGGCAGCGCACCA | |
| | ATSGSETPGSPAGSPTSTEE | | GGTACCTCTACTGAACCTTCTGAGGGCAGCGCTCCA | |
| | GTSESATPESGPGTSTEPSE | | GGTACTTCTGAAAGCGCTACCCCGGAATCTGGCCCA | |
| | GSAPGTSTEPSEGSAPGSP | | GGTAGCGAACCGGCTACTTCTGGTTCTGAAACCCCA | |
| | AGSPTSTEEGTSTEPSEGSA | | GGTAGCGAACCGGCTACCTCCGGTTCTGAAACTCCA | |
| | PGTSTEPSEGSAPGTSESAT | | GGTAGCCCGGCAGGCTCTCCGACCTCTACTGAGGAA | |
| | PESGPGTSTEPSEGSAPGTS | | GGTACTTCTGAAAGCGCAACCCCGGAGTCCGGCCCA | |
| | ESATPESGPGSEPATSGSET | | GGTACCTCTACCGAACCGTCTGAGGGCAGCGCACCA | |
| | PGTSTEPSEGSAPGTSTEPS | | GGTACTTCTACCGAACCGTCCGAGGGTAGCGCACCA | |
| | EGSAPGTSESATPESGPGT | | GGTAGCCCAGCAGGTTCTCCTACCTCCACCGAGGAA | |
| | SESATPESGPGSPAGSPTST | | GGTACTTCTACCGAACCGTCCGAGGGTAGCGCACCA | |
| | EEGTSESATPESGPGSEPAT | | GGTACCTCTACTGAACCTTCTGAGGGCAGCGCTCCA | |
| | SGSETPGTSESATPESGPGT | | GGTACTTCTGAAAGCGCTACCCCGGAGTCCGGTCCA | |
| | STEPSEGSAPGTSTEPSEGS | | GGTACTTCTACTGAACCGTCCGAAGGTAGCGCACCA | |
| | APGTSTEPSEGSAPGTSTEP | | GGTACTTCTGAAAGCGCAACCCCTGAATCCGGTCCA | |
| | SEGSAPGTSTEPSEGSAPG | | GGTAGCGAACCGGCTACTTCTGGCTCTGAGACTCCA | |
| | TSTEPSEGSAPGSPAGSPTS | | GGTACTTCTACCGAACCGTCCGAAGGTAGCGCACCA | |
| | TEEGTSTEPSEGSAPGTSES | | GGTACTTCTACTGAACCGTCTGAAGGTAGCGCACCA | |
| | ATPESGPGSEPATSGSETP | | GGTACTTCTGAAAGCGCAACCCCGGAATCCGGCCCA | |
| | GTSESATPESGPGSEPATS | | GGTACCTCTGAAAGCGCAACCCCGGAGTCCGGCCCA | |
| | GSETPGTSESATPESGPGTS | | GGTAGCCCTGCTGGCTCTCCAACCTCCACCGAAGAA | |
| | TEPSEGSAPGTSESATPESG | | GGTACCTCTGAAAGCGCAACCCCTGAATCCGGCCCA | |
| | PGSPAGSPTSTEEGSPAGSP | | GGTAGCGAACCGGCAACCTCCGGTTCTGAAACCCCA | |
| | TSTEEGSPAGSPTSTEEGTS | | GGTACCTCTGAAAGCGCTACTCCGGAGTCTGGCCCA | |
| | ESATPESGPGTSTEPSEGSA | | GGTACCTCTACTGAACCGTCTGAGGGTAGCGCTCCA | |
| | PGFPTIPLSRLFDNAMLRA | | GGTACTTCTACTGAACCGTCCGAAGGTAGCGCACCA | |
| | HRLHQLAFDTYQEFEEAYI | | GGTACTTCTACCGAACCGTCCGAAGGCAGCGCTCCA | |
| | PKEQKYSFLQNPQTSLCFS | | GGTACCTCTACTGAACCTTCCGAGGGCAGCGCTCCA | |
| | ESIPTPSNREETQQKSNLEL | | GGTACCTCTACCGAACCTTCTGAAGGTAGCGCACCA | |
| | LRISLLLIQSWLEPVQFLRS | | GGTACTTCTACCGAACCGTCCGAGGGTAGCGCACCA | |
| | VFANSLVYGASDSNVYDL | | GGTAGCCCAGCAGGTTCTCCTACCTCCACCGAGGAA | |
| | LKDLEEGIQTLMGRLEDGS | | GGTACTTCTACCGAACCGTCCGAGGGTAGCGCACCA | |
| | PRTGQIFKQTYSKFDTNSH | | GGTACCTCTGAAAGCGCAACTCCTGAGTCTGGCCCA | |
| | NDDALLKNYGLLYCFRKD | | GGTAGCGAACCTGCTACCTCCGGCTCTGAGACTCCA | |
| | MDKVETFLRIVQCRSVEGS | | GGTACCTCTGAAAGCGCAACCCCGGAATCTGGTCCA | |
| | CGF | | GGTAGCGAACCTGCAACCTCTGGCTCTGAAACCCCA | |
| | | | GGTACCTCTGAAAGCGCTACTCCTGAATCTGGCCCA | |
| | | | GGTACTTCTACTGAACCGTCCGAGGGCAGCGCACCA | |
| | | | GGTACTTCTGAAAGCGCTACTCCTGAGTCCGGCCCA | |
| | | | GGTAGCCCGGCTGGCTCTCCGACTTCCACCGAGGAA | |
| | | | GGTAGCCCGGCTGGCTCTCCAACTTCTACTGAAGAA | |
| | | | GGTAGCCCGGCAGGCTCTCCGACCTCTACTGAGGAA | |
| | | | GGTACTTCTGAAAGCGCAACCCCGGAGTCCGGCCCA | |
| | | | GGTACCTCTACCGAACCGTCTGAGGGCAGCGCACCA | |
| | | | GGTTTTCCGACTATTCCGCTGTCTCGTCTGTTTGATA | |
| | | | ATGCTATGCTGCGTGCGCACCGTCTGCACCAGCTGG | |
| | | | CCTTTGATACTTACCAGGAATTTGAAGAAGCcTACAT | |
| | | | TCCTAAAGAGCAGAAGTACTCTTTCCTGCAAAACCC | |
| | | | ACAGACTTCTCTCTGCTTCAGCGAATCTATTCCGACG | |
| | | | CCTTCCAATCGCGAGGAAACTCAGCAAAAGTCCAAT | |
| | | | CTGGAACTACTCCGCATTTCTCTGCTTCTGATTCAGA | |
| | | | GCTGGCTAGAACCAGTGCAATTTCTGCGTTCCGTCTT | |
| | | | CGCCAATAGCCTAGTTTATGGCGCATCCGACAGCAA | |
| | | | CGTATACGATCTCCTGAAAGATCTCGAGGAAGGCAT | |
| | | | TCAGACCCTGATGGGTCGTCTCGAGGATGGCTCTCC | |
| | | | GCGTACTGGTCAGATCTTCAAGCAGACTTACTCTAA | |
| | | | ATTTGATACTAACAGCCACAATGACGATGCGCTTCT | |
| | | | AAAAAACTATGGTCTGCTGTATTGTTTTCGTAAAGAT | |
| | | | ATGGACAAAGTTGAAACCTTCCTGCGTATTGTTCAGT | |
| | | | GTCGTTCCGTTGAGGGCAGCTGTGGTTTCTAA | |
| AF576- | GSTSSTAESPGPGSTSSTAE | 683 | GGTTCTACTAGCTCTACCGCTGAATCTCCTGGCCCAG | 684 |
| hGH | SPGPGSTSESPSGTAPGSTS | | GTTCCACTAGCTCTACCGCAGAATCTCCGGGCCCAG | |
| | STAESPGPGSTSSTAESPGP | | GTTCTACTAGCGAATCCCCTTCTGGTACCGCTCCAGG | |
| | GTSTPESGSASPGSTSESPS | | TTCTACTAGCTCTACCGCTGAATCTCCGGGTCCAGGT | |
| | GTAPGTSPSGESSTAPGSTS | | TCTACCAGCTCTACTGCAGAATCTCCTGGCCCAGGTA | |
| | ESPSGTAPGSTSESPSGTAP | | CTTCTACTCCGGAAAGCGGTTCCGCTTCTCCAGGTTC | |
| | GTSPSGESSTAPGSTSESPS | | TACCAGCGAATCTCCTTCTGGCACCGCTCCAGGTACC | |
| | GTAPGSTSESPSGTAPGTSP | | TCTCCTAGCGGCGAATCTTCTACCGCTCCAGGTTCTA | |
| | SGESSTAPGSTSESPSGTAP | | CTAGCGAATCTCCTTCTGGCACTGCACCAGGTTCTAC | |
| | GSTSESPSGTAPGSTSESPS | | CAGCGAATCTCCTTCTGGCACCGCTCCAGGTACCTCT | |
| | GTAPGTSTPESGSASPGSTS | | CCTAGCGGCGAATCTTCTACCGCTCCAGGTTCTACTA | |
| | ESPSGTAPGTSTPESGSASP | | GCGAATCTCCTTCTGGCACTGCACCAGGTTCTACCAG | |
| | GSTSSTAESPGPGSTSSTAE | | CGAATCTCCTTCTGGCACCGCTCCAGGTACCTCTCCT | |
| | SPGPGTSTPESGSASPGTST | | AGCGGCGAATCTTCTACCGCTCCAGGTTCTACTAGC | |
| | PESGSASPGSTSESPSGTAP | | GAATCTCCTTCTGGCACTGCACCAGGTTCTACTAGCG | |
| | GTSTPESGSASPGTSTPESG | | AATCTCCTTCTGGCACTGCACCAGGTTCTACCAGCGA | |
| | SASPGSTSESPSGTAPGSTS | | ATCTCCGTCTGGCACTGCACCAGGTACCTCTACCCCT | |
| | ESPSGTAPGSTSESPSGTAP | | GAAAGCGGTTCCGCTTCTCCAGGTTCTACTAGCGAA | |
| | GSTSSTAESPGPGTSTPESG | | TCTCCTTCTGGTACCGCTCCAGGTACTTCTACCCCTG | |
| | SASPGTSTPESGSASPGSTS | | AAAGCGGCTCCGCTTCTCCAGGTTCCACTAGCTCTAC | |
| | ESPSGTAPGSTSESPSGTAP | | CGCTGAATCTCCGGGTCCAGGTTCTACTAGCTCTACT | |
| | GTSTPESGSASPGSTSESPS | | GCAGAATCTCCTGGCCCAGGTACCTCTACTCCGGAA | |
| | GTAPGSTSESPSGTAPGTS | | AGCGGCTCTGCATCTCCAGGTACTTCTACCCCTGAAA | |
| | TPESGSASPGTSPSGESSTA | | GCGGTTCTGCATCTCCAGGTTCTACTAGCGAATCCCC | |
| | PGSTSSTAESPGPGTSPSGE | | GTCTGGTACCGCACCAGGTACTTCTACCCCGGAAAG | |
| | SSTAPGSTSSTAESPGPGTS | | CGGCTCTGCTTCTCCAGGTACTTCTACCCCGGAAAGC | |
| | TPESGSASPGSTSESPSGTA | | GGCTCCGCATCTCCAGGTTCTACTAGCGAATCTCCTT | |
| | PGSTSSTAESPGPGTSTPES | | CTGGTACCGCTCCAGGTTCTACCAGCGAATCCCCGTC | |
| | GSASPGTSTPESGSASPGFP | | TGGTACTGCTCCAGGTTCTACCAGCGAATCTCCTTCT | |
| | TIPLSRLFDNAMLRAHRLH | | GGTACTGCACCAGGTTCTACTAGCTCTACTGCAGAA | |
| | QLAFDTYQEFEEAYIPKEQ | | TCTCCTGGCCCAGGTACCTCTACTCCGGAAAGCGGC | |
| | KYSFLQNPQTSLCFSESIPT | | TCTGCATCTCCAGGTACTTCTACCCCTGAAAGCGGTT | |
| | PSNREETQQKSNLELLRISL | | CTGCATCTCCAGGTTCTACTAGCGAATCTCCTTCTGG | |
| | LLIQSWLEPVQFLRSVFAN | | CACTGCACCAGGTTCTACCAGCGAATCTCCGTCTGG | |
| | SLVYGASDSNVYDLLKDL | | CACTGCACCAGGTACCTCTACCCCTGAAAGCGGTTC | |
| | EEGIQTLMGRLEDGSPRTG | | CGCTTCTCCAGGTTCTACTAGCGAATCTCCTTCTGGC | |
| | QIFKQTYSKFDTNSHNDD | | ACTGCACCAGGTTCTACCAGCGAATCTCCGTCTGGC | |
| | ALLKNYGLLYCFRKDMD | | ACTGCACCAGGTACCTCTACCCCTGAAAGCGGTTCC | |
| | KVETFLRIVQCRSVEGSCGF | | GCTTCTCCAGGTACTTCTCCGAGCGGTGAATCTTCTA | |
| | | | CCGCACCAGGTTCTACTAGCTCTACCGCTGAATCTCC | |
| | | | GGGCCCAGGTACTTCTCCGAGCGGTGAATCTTCTACT | |
| | | | GCTCCAGGTTCCACTAGCTCTACTGCTGAATCTCCTG | |
| | | | GCCCAGGTACTTCTACTCCGGAAAGCGGTTCCGCTTC | |
| | | | TCCAGGTTCTACTAGCGAATCTCCGTCTGGCACCGCA | |
| | | | CCAGGTTCTACTAGCTCTACTGCAGAATCTCCTGGCC | |
| | | | CAGGTACCTCTACTCCGGAAAGCGGCTCTGCATCTC | |
| | | | CAGGTACTTCTACCCCTGAAAGCGGTTCTGCATCTCC | |
| | | | AGGTTTTCCGACTATTCCGCTGTCTCGTCTGTTTGAT | |
| | | | AATGCTATGCTGCGTGCGCACCGTCTGCACCAGCTG | |
| | | | GCCTTTGATACTTACCAGGAATTTGAAGAAGCcTACA | |
| | | | TTCCTAAAGAGCAGAAGTACTCTTTCCTGCAAAACC | |
| | | | CACAGACTTCTCTCTGCTTCAGCGAATCTATTCCGAC | |
| | | | GCCTTCCAATCGCGAGGAAACTCAGCAAAAGTCCAA | |
| | | | TCTGGAACTACTCCGCATTTCTCTGCTTCTGATTCAG | |
| | | | AGCTGGCTAGAACCAGTGCAATTTCTGCGTTCCGTCT | |
| | | | TCGCCAATAGCCTAGTTTATGGCGCATCCGACAGCA | |
| | | | ACGTATACGATCTCCTGAAAGATCTCGAGGAAGGCA | |
| | | | TTCAGACCCTGATGGGTCGTCTCGAGGATGGCTCTCC | |
| | | | GCGTACTGGTCAGATCTTCAAGCAGACTTACTCTAA | |
| | | | ATTTGATACTAACAGCCACAATGACGATGCGCTTCT | |
| | | | AAAAAACTATGGTCTGCTGTATTGTTTTCGTAAAGAT | |
| | | | ATGGACAAAGTTGAAACCTTCCTGCGTATTGTTCAGT | |
| | | | GTCGTTCCGTTGAGGGCAGCTGTGGTTTCTAA | |
| AE624- | MAEPAGSPTSTEEGTPGSG | 685 | ATGGCTGAACCTGCTGGCTCTCCAACCTCCACTGAG | 686 |
| hGH | TASSSPGSSTPSGATGSPG | | GAAGGTACCCCGGGTAGCGGTACTGCTTCTTCCTCTC | |
| | ASPGTSSTGSPGSPAGSPTS | | CAGGTAGCTCTACCCCTTCTGGTGCAACCGGCTCTCC | |
| | TEEGTSESATPESGPGTSTE | | AGGTGCTTCTCCGGGCACCAGCTCTACCGGTTCTCCA | |
| | PSEGSAPGSPAGSPTSTEEG | | GGTAGCCCGGCTGGCTCTCCTACCTCTACTGAGGAA | |
| | TSTEPSEGSAPGTSTEPSEG | | GGTACTTCTGAAAGCGCTACTCCTGAGTCTGGTCCA | |
| | SAPGTSESATPESGPGSEPA | | GGTACCTCTACTGAACCGTCCGAAGGTAGCGCTCCA | |
| | TSGSETPGSEPATSGSETPG | | GGTAGCCCAGCAGGCTCTCCGACTTCCACTGAGGAA | |
| | SPAGSPTSTEEGTSESATPE | | GGTACTTCTACTGAACCTTCCGAAGGCAGCGCACCA | |
| | SGPGTSTEPSEGSAPGTSTE | | GGTACCTCTACTGAACCTTCTGAGGGCAGCGCTCCA | |
| | PSEGSAPGSPAGSPTSTEEG | | GGTACTTCTGAAAGCGCTACCCCGGAATCTGGCCCA | |
| | TSTEPSEGSAPGTSTEPSEG | | GGTAGCGAACCGGCTACTTCTGGTTCTGAAACCCCA | |
| | SAPGTSESATPESGPGTSTE | | GGTAGCGAACCGGCTACCTCCGGTTCTGAAACTCCA | |
| | PSEGSAPGTSESATPESGPG | | GGTAGCCCGGCAGGCTCTCCGACCTCTACTGAGGAA | |
| | SEPATSGSETPGTSTEPSEG | | GGTACTTCTGAAAGCGCAACCCCGGAGTCCGGCCCA | |
| | SAPGTSTEPSEGSAPGTSES | | GGTACCTCTACCGAACCGTCTGAGGGCAGCGCACCA | |
| | ATPESGPGTSESATPESGP | | GGTACTTCTACCGAACCGTCCGAGGGTAGCGCACCA | |
| | GSPAGSPTSTEEGTSESATP | | GGTAGCCCAGCAGGTTCTCCTACCTCCACCGAGGAA | |
| | ESGPGSEPATSGSETPGTSE | | GGTACTTCTACCGAACCGTCCGAGGGTAGCGCACCA | |
| | SATPESGPGTSTEPSEGSAP | | GGTACCTCTACTGAACCTTCTGAGGGCAGCGCTCCA | |
| | GTSTEPSEGSAPGTSTEPSE | | GGTACTTCTGAAAGCGCTACCCCGGAGTCCGGTCCA | |
| | GSAPGTSTEPSEGSAPGTS | | GGTACTTCTACTGAACCGTCCGAAGGTAGCGCACCA | |
| | TEPSEGSAPGTSTEPSEGSA | | GGTACTTCTGAAAGCGCAACCCCTGAATCCGGTCCA | |
| | PGSPAGSPTSTEEGTSTEPS | | GGTAGCGAACCGGCTACTTCTGGCTCTGAGACTCCA | |
| | EGSAPGTSESATPESGPGS | | GGTACTTCTACCGAACCGTCCGAAGGTAGCGCACCA | |
| | EPATSGSETPGTSESATPES | | GGTACTTCTACTGAACCGTCTGAAGGTAGCGCACCA | |
| | GPGSEPATSGSETPGTSES | | GGTACTTCTGAAAGCGCAACCCCGGAATCCGGCCCA | |
| | ATPESGPGTSTEPSEGSAP | | GGTACCTCTGAAAGCGCAACCCCGGAGTCCGGCCCA | |
| | GTSESATPESGPGSPAGSPT | | GGTAGCCCTGCTGGCTCTCCAACCTCCACCGAAGAA | |
| | STEEGSPAGSPTSTEEGSPA | | GGTACCTCTGAAAGCGCAACCCCTGAATCCGGCCCA | |
| | GSPTSTEEGTSESATPESGP | | GGTAGCGAACCGGCAACCTCCGGTTCTGAAACCCCA | |
| | GTSTEPSEGSAPGFPTIPLS | | GGTACCTCTGAAAGCGCTACTCCGGAGTCTGGCCCA | |
| | RLFDNAMLRAHRLHQLAF | | GGTACCTCTACTGAACCGTCTGAGGGTAGCGCTCCA | |
| | DTYQEFEEAYIPKEQKYSF | | GGTACTTCTACTGAACCGTCCGAAGGTAGCGCACCA | |
| | LQNPQTSLCFSESIPTPSNR | | GGTACTTCTACCGAACCGTCCGAAGGCAGCGCTCCA | |
| | EETQQKSNLELLRISLLLIQ | | GGTACCTCTACTGAACCTTCCGAGGGCAGCGCTCCA | |
| | SWLEPVQFLRSVFANSLV | | GGTACCTCTACCGAACCTTCTGAAGGTAGCGCACCA | |
| | YGASDSNVYDLLKDLEEG | | GGTACTTCTACCGAACCGTCCGAGGGTAGCGCACCA | |
| | IQTLMGRLEDGSPRTGQIF | | GGTAGCCCAGCAGGTTCTCCTACCTCCACCGAGGAA | |
| | KQTYSKFDTNSHNDDALL | | GGTACTTCTACCGAACCGTCCGAGGGTAGCGCACCA | |
| | KNYGLLYCFRKDMDKVE | | GGTACCTCTGAAAGCGCAACTCCTGAGTCTGGCCCA | |
| | TFLRIVQCRSVEGSCGF | | GGTAGCGAACCTGCTACCTCCGGCTCTGAGACTCCA | |
| | | | GGTACCTCTGAAAGCGCAACCCCGGAATCTGGTCCA | |
| | | | GGTAGCGAACCTGCAACCTCTGGCTCTGAAACCCCA | |
| | | | GGTACCTCTGAAAGCGCTACTCCTGAATCTGGCCCA | |
| | | | GGTACTTCTACTGAACCGTCCGAGGGCAGCGCACCA | |
| | | | GGTACTTCTGAAAGCGCTACTCCTGAGTCCGGCCCA | |
| | | | GGTAGCCCGGCTGGCTCTCCGACTTCCACCGAGGAA | |
| | | | GGTAGCCCGGCTGGCTCTCCAACTTCTACTGAAGAA | |
| | | | GGTAGCCCGGCAGGCTCTCCGACCTCTACTGAGGAA | |
| | | | GGTACTTCTGAAAGCGCAACCCCGGAGTCCGGCCCA | |
| | | | GGTACCTCTACCGAACCGTCTGAGGGCAGCGCACCA | |
| | | | GGTTTTCCGACTATTCCGCTGTCTCGTCTGTTTGATA | |
| | | | ATGCTATGCTGCGTGCGCACCGTCTGCACCAGCTGG | |
| | | | CCTTTGATACTTACCAGGAATTTGAAGAAGCcTACAT | |
| | | | TCCTAAAGAGCAGAAGTACTCTTTCCTGCAAAACCC | |
| | | | ACAGACTTCTCTCTGCTTCAGCGAATCTATTCCGACG | |
| | | | CCTTCCAATCGCGAGGAAACTCAGCAAAAGTCCAAT | |
| | | | CTGGAACTACTCCGCATTTCTCTGCTTCTGATTCAGA | |
| | | | GCTGGCTAGAACCAGTGCAATTTCTGCGTTCCGTCTT | |
| | | | CGCCAATAGCCTAGTTTATGGCGCATCCGACAGCAA | |
| | | | CGTATACGATCTCCTGAAAGATCTCGAGGAAGGCAT | |
| | | | TCAGACCCTGATGGGTCGTCTCGAGGATGGCTCTCC | |
| | | | GCGTACTGGTCAGATCTTCAAGCAGACTTACTCTAA | |
| | | | ATTTGATACTAACAGCCACAATGACGATGCGCTTCT | |
| | | | AAAAAACTATGGTCTGCTGTATTGTTTTCGTAAAGAT | |
| | | | ATGGACAAAGTTGAAACCTTCCTGCGTATTGTTCAGT | |
| | | | GTCGTTCCGTTGAGGGCAGCTGTGGTTTCTAA | |
| AD836- | GSSESGSSEGGPGSSESGSS | 687 | GGTTCCTCTGAAAGCGGTTCTTCCGAAGGTGGTCCA | 688 |
| hGH | EGGPGESPGGSSGSESGSG | | GGTTCCTCTGAAAGCGGTTCTTCTGAGGGTGGTCCA | |
| | GEPSESGSSGESPGGSSGSE | | GGTGAATCTCCGGGTGGCTCCAGCGGTTCCGAGTCA | |
| | SGESPGGSSGSESGSSESGS | | GGTTCTGGTGGCGAACCTTCCGAGTCTGGTAGCTCA | |
| | SEGGPGSSESGSSEGGPGS | | GGTGAATCTCCGGGTGGTTCTAGCGGTTCCGAGTCA | |
| | SESGSSEGGPGESPGGSSG | | GGTGAATCTCCGGGTGGTTCCAGCGGTTCTGAGTCA | |
| | SESGESPGGSSGSESGESPG | | GGTTCCTCCGAAAGCGGTTCTTCTGAGGGCGGTCCA | |
| | GSSGSESGSSESGSSEGGP | | GGTTCCTCCGAAAGCGGTTCTTCCGAGGGCGGTCCA | |
| | GSSESGSSEGGPGSSESGSS | | GGTTCTTCTGAAAGCGGTTCTTCCGAGGGCGGTCCA | |
| | EGGPGSSESGSSEGGPGSS | | GGTGAATCTCCTGGTGGTTCCAGCGGTTCCGAGTCA | |
| | ESGSSEGGPGSSESGSSEG | | GGTGAATCTCCAGGTGGCTCTAGCGGTTCCGAGTCA | |
| | GPGSGGEPSESGSSGESPG | | GGTGAATCTCCTGGTGGTTCTAGCGGTTCTGAATCAG | |
| | GSSGSESGESPGGSSGSES | | GTTCCTCCGAAAGCGGTTCTTCTGAGGGCGGTCCAG | |
| | GSGGEPSESGSSGSEGSSG | | GTTCCTCCGAAAGCGGTTCTTCCGAGGGCGGTCCAG | |
| | PGESSGSSESGSSEGGPGS | | GTTCTTCTGAAAGCGGTTCTTCCGAGGGCGGTCCAG | |
| | GGEPSESGSSGSEGSSGPG | | GTTCCTCTGAAAGCGGTTCTTCTGAGGGCGGTCCAG | |
| | ESSGSSESGSSEGGPGSGG | | GTTCTTCCGAAAGCGGTTCTTCCGAGGGCGGTCCAG | |
| | EPSESGSSGESPGGSSGSES | | GTTCTTCCGAAAGCGGTTCTTCTGAAGGCGGTCCAG | |
| | GSGGEPSESGSSGSGGEPS | | GTTCTGGTGGCGAACCGTCCGAGTCTGGTAGCTCAG | |
| | ESGSSGSSESGSSEGGPGS | | GTGAATCTCCGGGTGGCTCTAGCGGTTCCGAGTCAG | |
| | GGEPSESGSSGSGGEPSES | | GTGAATCTCCTGGTGGTTCCAGCGGTTCCGAGTCAG | |
| | GSSGSEGSSGPGESSGESP | | GTTCCGGTGGCGAACCGTCCGAATCTGGTAGCTCAG | |
| | GGSSGSESGSEGSSGPGES | | GTAGCGAAGGTTCTTCTGGTCCAGGCGAATCTTCAG | |
| | SGSEGSSGPGESSGSGGEP | | GTTCCTCTGAAAGCGGTTCTTCTGAGGGCGGTCCAG | |
| | SESGSSGSSESGSSEGGPGS | | GTTCCGGTGGCGAACCGTCCGAATCTGGTAGCTCAG | |
| | SESGSSEGGPGESPGGSSG | | GTAGCGAAGGTTCTTCTGGTCCAGGCGAATCTTCAG | |
| | SESGSGGEPSESGSSGSEGS | | GTTCCTCTGAAAGCGGTTCTTCTGAGGGCGGTCCAG | |
| | SGPGESSGESPGGSSGSES | | GTTCCGGTGGCGAACCTTCCGAATCTGGTAGCTCAG | |
| | GSEGSSGPGSSESGSSEGG | | GTGAATCTCCGGGTGGTTCTAGCGGTTCTGAGTCAG | |
| | PGSGGEPSESGSSGSEGSS | | GTTCTGGTGGTGAACCTTCCGAGTCTGGTAGCTCAG | |
| | GPGESSGSEGSSGPGESSG | | GTTCTGGTGGCGAACCATCCGAGTCTGGTAGCTCAG | |
| | SEGSSGPGESSGSGGEPSES | | GTTCTTCCGAAAGCGGTTCTTCCGAAGGCGGTCCAG | |
| | GSSGSGGEPSESGSSGESP | | GTTCTGGTGGTGAACCGTCCGAATCTGGTAGCTCAG | |
| | GGSSGSESGESPGGSSGSE | | GTTCTGGTGGCGAACCATCCGAATCTGGTAGCTCAG | |
| | SGSGGEPSESGSSGSEGSS | | GTAGCGAAGGTTCTTCTGGTCCTGGCGAATCTTCAG | |
| | GPGESSGESPGGSSGSESG | | GTGAATCTCCAGGTGGCTCTAGCGGTTCCGAATCAG | |
| | SSESGSSEGGPGSSESGSSE | | GTAGCGAAGGTTCTTCCGGTCCAGGTGAATCTTCAG | |
| | GGPGSSESGSSEGGPGSGG | | GTAGCGAAGGTTCTTCTGGTCCTGGTGAATCCTCAG | |
| | EPSESGSSGSSESGSSEGGP | | GTTCCGGTGGCGAACCATCTGAATCTGGTAGCTCAG | |
| | GESPGGSSGSESGSGGEPS | | GTTCCTCTGAAAGCGGTTCTTCCGAAGGTGGTCCAG | |
| | ESGSSGSSESGSSEGGPGES | | GTTCCTCTGAAAGCGGTTCTTCTGAGGGTGGTCCAG | |
| | PGGSSGSESGSGGEPSESG | | GTGAATCTCCGGGTGGCTCCAGCGGTTCCGAGTCAG | |
| | SSGESPGGSSGSESGSGGE | | GTTCTGGTGGCGAACCATCCGAATCTGGTAGCTCAG | |
| | PSESGSSGFPTIPLSRLFDN | | GTAGCGAAGGTTCTTCTGGTCCTGGCGAATCTTCAG | |
| | AMLRAHRLHQLAFDTYQE | | GTGAATCTCCAGGTGGCTCTAGCGGTTCCGAATCAG | |
| | FEEAYIPKEQKYSFLQNPQ | | GTAGCGAAGGTTCTTCCGGTCCaGGTTCCTCTGAAAG | |
| | TSLCFSESIPTPSNREETQQ | | CGGTTCTTCTGAGGGCGGTCCAGGTTCTGGTGGCGA | |
| | KSNLELLRISLLLIQSWLEP | | ACCATCTGAATCTGGTAGCTCAGGTAGCGAAGGTTC | |
| | VQFLRSVFANSLVYGASD | | TTCCGGTCCGGGTGAATCTTCAGGTAGCGAAGGTTC | |
| | SNVYDLLKDLEEGIQTLM | | TTCCGGTCCAGGTGAATCTTCAGGTAGCGAAGGTTC | |
| | GRLEDGSPRTGQIFKQTYS | | TTCTGGTCCTGGTGAATCCTCAGGTTCCGGTGGCGAA | |
| | KFDTNSHNDDALLKNYGL | | CCATCTGAATCTGGTAGCTCAGGTTCTGGTGGCGAA | |
| | LYCFRKDMDKVETFLRIV | | CCATCCGAATCTGGTAGCTCAGGTGAATCTCCGGGT | |
| | QCRSVEGSCGF | | GGCTCCAGCGGTTCTGAATCAGGTGAATCTCCTGGT | |
| | | | GGCTCCAGCGGTTCTGAGTCAGGTTCTGGTGGCGAA | |
| | | | CCATCCGAATCTGGTAGCTCAGGTAGCGAAGGTTCT | |
| | | | TCTGGTCCTGGCGAATCTTCAGGTGAATCTCCAGGTG | |
| | | | GCTCTAGCGGTTCCGAATCAGGTTCCTCTGAAAGCG | |
| | | | GTTCTTCTGAGGGCGGTCCAGGTTCTTCCGAAAGCG | |
| | | | GTTCTTCCGAGGGCGGTCCAGGTTCTTCCGAAAGCG | |
| | | | GTTCTTCTGAAGGCGGTCCAGGTTCTGGTGGCGAAC | |
| | | | CGTCCGAATCTGGTAGCTCAGGTTCCTCCGAAAGCG | |
| | | | GTTCTTCTGAAGGTGGTCCAGGTGAATCTCCAGGTG | |
| | | | GTTCTAGCGGTTCTGAATCAGGTTCTGGTGGCGAAC | |
| | | | CGTCCGAATCTGGTAGCTCAGGTTCCTCCGAAAGCG | |
| | | | GTTCTTCTGAAGGTGGTCCAGGTGAATCTCCAGGTG | |
| | | | GTTCTAGCGGTTCTGAATCAGGTTCTGGTGGCGAAC | |
| | | | CGTCCGAATCTGGTAGCTCAGGTGAATCTCCTGGTG | |
| | | | GTTCCAGCGGTTCCGAGTCAGGTTCTGGTGGCGAAC | |
| | | | CTTCCGAATCTGGTAGCTCAGGTTTTCCGACTATTCC | |
| | | | GCTGTCTCGTCTGTTTGATAATGCTATGCTGCGTGCG | |
| | | | CACCGTCTGCACCAGCTGGCCTTTGATACTTACCAGG | |
| | | | AATTTGAAGAAGCcTACATTCCTAAAGAGCAGAAGT | |
| | | | ACTCTTTCCTGCAAAACCCACAGACTTCTCTCTGCTT | |
| | | | CAGCGAATCTATTCCGACGCCTTCCAATCGCGAGGA | |
| | | | AACTCAGCAAAAGTCCAATCTGGAACTACTCCGCAT | |
| | | | TTCTCTGCTTCTGATTCAGAGCTGGCTAGAACCAGTG | |
| | | | CAATTTCTGCGTTCCGTCTTCGCCAATAGCCTAGTTT | |
| | | | ATGGCGCATCCGACAGCAACGTATACGATCTCCTGA | |
| | | | AAGATCTCGAGGAAGGCATTCAGACCCTGATGGGTC | |
| | | | GTCTCGAGGATGGCTCTCCGCGTACTGGTCAGATCTT | |
| | | | CAAGCAGACTTACTCTAAATTTGATACTAACAGCCA | |
| | | | CAATGACGATGCGCTTCTAAAAAACTATGGTCTGCT | |
| | | | GTATTGTTTTCGTAAAGATATGGACAAAGTTGAAAC | |
| | | | CTTCCTGCGTATTGTTCAGTGTCGTTCCGTTGAGGGC | |
| | | | AGCTGTGGTTTCTAA | |
| AE864- | GSPAGSPTSTEEGTSESATP | 689 | GGTAGCCCGGCTGGCTCTCCTACCTCTACTGAGGAA | 690 |
| hGH | ESGPGTSTEPSEGSAPGSPA | | GGTACTTCTGAAAGCGCTACTCCTGAGTCTGGTCCA | |
| | GSPTSTEEGTSTEPSEGSAP | | GGTACCTCTACTGAACCGTCCGAAGGTAGCGCTCCA | |
| | GTSTEPSEGSAPGTSESATP | | GGTAGCCCAGCAGGCTCTCCGACTTCCACTGAGGAA | |
| | ESGPGSEPATSGSETPGSEP | | GGTACTTCTACTGAACCTTCCGAAGGCAGCGCACCA | |
| | ATSGSETPGSPAGSPTSTEE | | GGTACCTCTACTGAACCTTCTGAGGGCAGCGCTCCA | |
| | GTSESATPESGPGTSTEPSE | | GGTACTTCTGAAAGCGCTACCCCGGAATCTGGCCCA | |
| | GSAPGTSTEPSEGSAPGSP | | GGTAGCGAACCGGCTACTTCTGGTTCTGAAACCCCA | |
| | AGSPTSTEEGTSTEPSEGSA | | GGTAGCGAACCGGCTACCTCCGGTTCTGAAACTCCA | |
| | PGTSTEPSEGSAPGTSESAT | | GGTAGCCCGGCAGGCTCTCCGACCTCTACTGAGGAA | |
| | PESGPGTSTEPSEGSAPGTS | | GGTACTTCTGAAAGCGCAACCCCGGAGTCCGGCCCA | |
| | ESATPESGPGSEPATSGSET | | GGTACCTCTACCGAACCGTCTGAGGGCAGCGCACCA | |
| | PGTSTEPSEGSAPGTSTEPS | | GGTACTTCTACCGAACCGTCCGAGGGTAGCGCACCA | |
| | EGSAPGTSESATPESGPGT | | GGTAGCCCAGCAGGTTCTCCTACCTCCACCGAGGAA | |
| | SESATPESGPGSPAGSPTST | | GGTACTTCTACCGAACCGTCCGAGGGTAGCGCACCA | |
| | EEGTSESATPESGPGSEPAT | | GGTACCTCTACTGAACCTTCTGAGGGCAGCGCTCCA | |
| | SGSETPGTSESATPESGPGT | | GGTACTTCTGAAAGCGCTACCCCGGAGTCCGGTCCA | |
| | STEPSEGSAPGTSTEPSEGS | | GGTACTTCTACTGAACCGTCCGAAGGTAGCGCACCA | |
| | APGTSTEPSEGSAPGTSTEP | | GGTACTTCTGAAAGCGCAACCCCTGAATCCGGTCCA | |
| | SEGSAPGTSTEPSEGSAPG | | GGTAGCGAACCGGCTACTTCTGGCTCTGAGACTCCA | |
| | TSTEPSEGSAPGSPAGSPTS | | GGTACTTCTACCGAACCGTCCGAAGGTAGCGCACCA | |
| | TEEGTSTEPSEGSAPGTSES | | GGTACTTCTACTGAACCGTCTGAAGGTAGCGCACCA | |
| | ATPESGPGSEPATSGSETP | | GGTACTTCTGAAAGCGCAACCCCGGAATCCGGCCCA | |
| | GTSESATPESGPGSEPATS | | GGTACCTCTGAAAGCGCAACCCCGGAGTCCGGCCCA | |
| | GSETPGTSESATPESGPGTS | | GGTAGCCCTGCTGGCTCTCCAACCTCCACCGAAGAA | |
| | TEPSEGSAPGTSESATPESG | | GGTACCTCTGAAAGCGCAACCCCTGAATCCGGCCCA | |
| | PGSPAGSPTSTEEGSPAGSP | | GGTAGCGAACCGGCAACCTCCGGTTCTGAAACCCCA | |
| | TSTEEGSPAGSPTSTEEGTS | | GGTACCTCTGAAAGCGCTACTCCGGAGTCTGGCCCA | |
| | ESATPESGPGTSTEPSEGSA | | GGTACCTCTACTGAACCGTCTGAGGGTAGCGCTCCA | |
| | PGTSESATPESGPGSEPATS | | GGTACTTCTACTGAACCGTCCGAAGGTAGCGCACCA | |
| | GSETPGTSESATPESGPGSE | | GGTACTTCTACCGAACCGTCCGAAGGCAGCGCTCCA | |
| | PATSGSETPGTSESATPESG | | GGTACCTCTACTGAACCTTCCGAGGGCAGCGCTCCA | |
| | PGTSTEPSEGSAPGSPAGSP | | GGTACCTCTACCGAACCTTCTGAAGGTAGCGCACCA | |
| | TSTEEGTSESATPESGPGSE | | GGTACTTCTACCGAACCGTCCGAGGGTAGCGCACCA | |
| | PATSGSETPGTSESATPESG | | GGTAGCCCAGCAGGTTCTCCTACCTCCACCGAGGAA | |
| | PGSPAGSPTSTEEGSPAGSP | | GGTACTTCTACCGAACCGTCCGAGGGTAGCGCACCA | |
| | TSTEEGTSTEPSEGSAPGTS | | GGTACCTCTGAAAGCGCAACTCCTGAGTCTGGCCCA | |
| | ESATPESGPGTSESATPESG | | GGTAGCGAACCTGCTACCTCCGGCTCTGAGACTCCA | |
| | PGTSESATPESGPGSEPATS | | GGTACCTCTGAAAGCGCAACCCCGGAATCTGGTCCA | |
| | GSETPGSEPATSGSETPGSP | | GGTAGCGAACCTGCAACCTCTGGCTCTGAAACCCCA | |
| | AGSPTSTEEGTSTEPSEGSA | | GGTACCTCTGAAAGCGCTACTCCTGAATCTGGCCCA | |
| | PGTSTEPSEGSAPGSEPATS | | GGTACTTCTACTGAACCGTCCGAGGGCAGCGCACCA | |
| | GSETPGTSESATPESGPGTS | | GGTACTTCTGAAAGCGCTACTCCTGAGTCCGGCCCA | |
| | TEPSEGSAPGFPTIPLSRLF | | GGTAGCCCGGCTGGCTCTCCGACTTCCACCGAGGAA | |
| | DNAMLRAHRLHQLAFDT | | GGTAGCCCGGCTGGCTCTCCAACTTCTACTGAAGAA | |
| | YQEFEEAYIPKEQKYSFLQ | | GGTAGCCCGGCAGGCTCTCCGACCTCTACTGAGGAA | |
| | NPQTSLCFSESIPTPSNREE | | GGTACTTCTGAAAGCGCAACCCCGGAGTCCGGCCCA | |
| | TQQKSNLELLRISLLLIQS | | GGTACCTCTACCGAACCGTCTGAGGGCAGCGCACCA | |
| | WLEPVQFLRSVFANSLVY | | GGTACCTCTGAAAGCGCAACTCCTGAGTCTGGCCCA | |
| | GASDSNVYDLLKDLEEGI | | GGTAGCGAACCTGCTACCTCCGGCTCTGAGACTCCA | |
| | QTLMGRLEDGSPRTGQIFK | | GGTACCTCTGAAAGCGCAACCCCGGAATCTGGTCCA | |
| | QTYSKFDTNSHNDDALLK | | GGTAGCGAACCTGCAACCTCTGGCTCTGAAACCCCA | |
| | NYGLLYCFRKDMDKVETF | | GGTACCTCTGAAAGCGCTACTCCTGAATCTGGCCCA | |
| | LRIVQCRSVEGSCGF | | GGTACTTCTACTGAACCGTCCGAGGGCAGCGCACCA | |
| | | | GGTAGCCCTGCTGGCTCTCCAACCTCCACCGAAGAA | |
| | | | GGTACCTCTGAAAGCGCAACCCCTGAATCCGGCCCA | |
| | | | GGTAGCGAACCGGCAACCTCCGGTTCTGAAACCCCA | |
| | | | GGTACTTCTGAAAGCGCTACTCCTGAGTCCGGCCCA | |
| | | | GGTAGCCCGGCTGGCTCTCCGACTTCCACCGAGGAA | |
| | | | GGTAGCCCGGCTGGCTCTCCAACTTCTACTGAAGAA | |
| | | | GGTACTTCTACCGAACCTTCCGAGGGCAGCGCACCA | |
| | | | GGTACTTCTGAAAGCGCTACCCCTGAGTCCGGCCCA | |
| | | | GGTACTTCTGAAAGCGCTACTCCTGAATCCGGTCCA | |
| | | | GGTACTTCTGAAAGCGCTACCCCGGAATCTGGCCCA | |
| | | | GGTAGCGAACCGGCTACTTCTGGTTCTGAAACCCCA | |
| | | | GGTAGCGAACCGGCTACCTCCGGTTCTGAAACTCCA | |
| | | | GGTAGCCCAGCAGGCTCTCCGACTTCCACTGAGGAA | |
| | | | GGTACTTCTACTGAACCTTCCGAAGGCAGCGCACCA | |
| | | | GGTACCTCTACTGAACCTTCTGAGGGCAGCGCTCCA | |
| | | | GGTAGCGAACCTGCAACCTCTGGCTCTGAAACCCCA | |
| | | | GGTACCTCTGAAAGCGCTACTCCTGAATCTGGCCCA | |
| | | | GGTACTTCTACTGAACCGTCCGAGGGCAGCGCACCA | |
| | | | GGTTTTCCGACTATTCCGCTGTCTCGTCTGTTTGATA | |
| | | | ATGCTATGCTGCGTGCGCACCGTCTGCACCAGCTGG | |
| | | | CCTTTGATACTTACCAGGAATTTGAAGAAGCcTACAT | |
| | | | TCCTAAAGAGCAGAAGTACTCTTTCCTGCAAAACCC | |
| | | | ACAGACTTCTCTCTGCTTCAGCGAATCTATTCCGACG | |
| | | | CCTTCCAATCGCGAGGAAACTCAGCAAAAGTCCAAT | |
| | | | CTGGAACTACTCCGCATTTCTCTGCTTCTGATTCAGA | |
| | | | GCTGGCTAGAACCAGTGCAATTTCTGCGTTCCGTCTT | |
| | | | CGCCAATAGCCTAGTTTATGGCGCATCCGACAGCAA | |
| | | | CGTATACGATCTCCTGAAAGATCTCGAGGAAGGCAT | |
| | | | TCAGACCCTGATGGGTCGTCTCGAGGATGGCTCTCC | |
| | | | GCGTACTGGTCAGATCTTCAAGCAGACTTACTCTAA | |
| | | | ATTTGATACTAACAGCCACAATGACGATGCGCTTCT | |
| | | | AAAAAACTATGGTCTGCTGTATTGTTTTCGTAAAGAT | |
| | | | ATGGACAAAGTTGAAACCTTCCTGCGTATTGTTCAGT | |
| | | | GTCGTTCCGTTGAGGGCAGCTGTGGTTTCTAA | |
| AF864- | GSTSESPSGTAPGTSPSGES | 691 | GGTTCTACCAGCGAATCTCCTTCTGGCACCGCTCCAG | 692 |
| hGH | STAPGSTSESPSGTAPGSTS | | GTACCTCTCCTAGCGGCGAATCTTCTACCGCTCCAGG | |
| | ESPSGTAPGTSTPESGSASP | | TTCTACTAGCGAATCTCCTTCTGGCACTGCACCAGGT | |
| | GTSTPESGSASPGSTSESPS | | TCTACTAGCGAATCCCCGTCTGGTACTGCTCCAGGTA | |
| | GTAPGSTSESPSGTAPGTSP | | CTTCTACTCCTGAAAGCGGTTCCGCTTCTCCAGGTAC | |
| | SGESSTAPGSTSESPSGTAP | | CTCTACTCCGGAAAGCGGTTCTGCATCTCCAGGTTCT | |
| | GTSPSGESSTAPGTSPSGES | | ACCAGCGAATCTCCTTCTGGCACCGCTCCAGGTTCTA | |
| | STAPGSTSSTAESPGPGTSP | | CTAGCGAATCCCCGTCTGGTACCGCACCAGGTACTT | |
| | SGESSTAPGTSPSGESSTAP | | CTCCTAGCGGCGAATCTTCTACCGCACCAGGTTCTAC | |
| | GSTSSTAESPGPGTSTPESG | | TAGCGAATCTCCGTCTGGCACTGCTCCAGGTACTTCT | |
| | SASPGTSTPESGSASPGSTS | | CCTAGCGGTGAATCTTCTACCGCTCCAGGTACTTCCC | |
| | ESPSGTAPGSTSESPSGTAP | | CTAGCGGCGAATCTTCTACCGCTCCAGGTTCTACTAG | |
| | GTSTPESGSASPGSTSSTAE | | CTCTACTGCAGAATCTCCGGGCCCAGGTACCTCTCCT | |
| | SPGPGTSTPESGSASPGSTS | | AGCGGTGAATCTTCTACCGCTCCAGGTACTTCTCCGA | |
| | ESPSGTAPGTSPSGESSTAP | | GCGGTGAATCTTCTACCGCTCCAGGTTCTACTAGCTC | |
| | GSTSSTAESPGPGTSPSGES | | TACTGCAGAATCTCCTGGCCCAGGTACCTCTACTCCG | |
| | STAPGTSTPESGSASPGSTS | | GAAAGCGGCTCTGCATCTCCAGGTACTTCTACCCCTG | |
| | STAESPGPGSTSSTAESPGP | | AAAGCGGTTCTGCATCTCCAGGTTCTACTAGCGAAT | |
| | GSTSSTAESPGPGSTSSTAE | | CTCCTTCTGGCACTGCACCAGGTTCTACCAGCGAATC | |
| | SPGPGTSPSGESSTAPGSTS | | TCCGTCTGGCACTGCACCAGGTACCTCTACCCCTGAA | |
| | ESPSGTAPGSTSESPSGTAP | | AGCGGTTCCGCTTCTCCAGGTTCTACCAGCTCTACCG | |
| | GTSTPESGPXXXGASASGA | | CAGAATCTCCTGGTCCAGGTACCTCTACTCCGGAAA | |
| | PSTXXXXSESPSGTAPGST | | GCGGCTCTGCATCTCCAGGTTCTACTAGCGAATCTCC | |
| | SESPSGTAPGSTSESPSGTA | | TTCTGGCACTGCACCAGGTACTTCTCCGAGCGGTGA | |
| | PGSTSESPSGTAPGSTSESP | | ATCTTCTACCGCACCAGGTTCTACTAGCTCTACCGCT | |
| | SGTAPGSTSESPSGTAPGTS | | GAATCTCCGGGCCCAGGTACTTCTCCGAGCGGTGAA | |
| | TPESGSASPGTSPSGESSTA | | TCTTCTACTGCTCCAGGTACCTCTACTCCTGAAAGCG | |
| | PGTSPSGESSTAPGSTSSTA | | GTTCTGCATCTCCAGGTTCCACTAGCTCTACCGCAGA | |
| | ESPGPGTSPSGESSTAPGTS | | ATCTCCGGGCCCAGGTTCTACTAGCTCTACTGCTGAA | |
| | TPESGSASPGSTSESPSGTA | | TCTCCTGGCCCAGGTTCTACTAGCTCTACTGCTGAAT | |
| | PGSTSESPSGTAPGTSPSGE | | CTCCGGGTCCAGGTTCTACCAGCTCTACTGCTGAATC | |
| | SSTAPGSTSESPSGTAPGTS | | TCCTGGTCCAGGTACCTCCCCGAGCGGTGAATCTTCT | |
| | TPESGSASPGTSTPESGSAS | | ACTGCACCAGGTTCTACTAGCGAATCTCCTTCTGGCA | |
| | PGSTSESPSGTAPGTSTPES | | CTGCACCAGGTTCTACCAGCGAATCTCCGTCTGGCA | |
| | GSASPGSTSSTAESPGPGST | | CTGCACCAGGTACCTCTACCCCTGAAAGCGGTCCXX | |
| | SESPSGTAPGSTSESPSGTA | | XXXXXXXXXXTGCAAGCGCAAGCGGCGCGCCAAGC | |
| | PGTSPSGESSTAPGSTSSTA | | ACGGGAXXXXXXXXTAGCGAATCTCCTTCTGGTACC | |
| | ESPGPGTSPSGESSTAPGTS | | GCTCCAGGTTCTACCAGCGAATCCCCGTCTGGTACTG | |
| | TPESGSASPGTSPSGESSTA | | CTCCAGGTTCTACCAGCGAATCTCCTTCTGGTACTGC | |
| | PGTSPSGESSTAPGTSPSGE | | ACCAGGTTCTACTAGCGAATCTCCTTCTGGTACCGCT | |
| | SSTAPGSTSSTAESPGPGST | | CCAGGTTCTACCAGCGAATCCCCGTCTGGTACTGCTC | |
| | SSTAESPGPGTSPSGESSTA | | CAGGTTCTACCAGCGAATCTCCTTCTGGTACTGCACC | |
| | PGSSPSASTGTGPGSSTPSG | | AGGTACTTCTACTCCGGAAAGCGGTTCCGCATCTCC | |
| | ATGSPGSSTPSGATGSPGF | | AGGTACTTCTCCTAGCGGTGAATCTTCTACTGCTCCA | |
| | PTIPLSRLFDNAMLRAHRL | | GGTACCTCTCCTAGCGGCGAATCTTCTACTGCTCCAG | |
| | HQLAFDTYQEFEEAYIPKE | | GTTCTACCAGCTCTACTGCTGAATCTCCGGGTCCAGG | |
| | QKYSFLQNPQTSLCFSESIP | | TACTTCCCCGAGCGGTGAATCTTCTACTGCACCAGGT | |
| | TPSNREETQQKSNLELLRIS | | ACTTCTACTCCGGAAAGCGGTTCCGCTTCTCCAGGTT | |
| | LLLIQSWLEPVQFLRSVFA | | CTACCAGCGAATCTCCTTCTGGCACCGCTCCAGGTTC | |
| | NSLVYGASDSNVYDLLKD | | TACTAGCGAATCCCCGTCTGGTACCGCACCAGGTAC | |
| | LEEGIQTLMGRLEDGSPRT | | TTCTCCTAGCGGCGAATCTTCTACCGCACCAGGTTCT | |
| | GQIFKQTYSKFDTNSHND | | ACTAGCGAATCCCCGTCTGGTACCGCACCAGGTACT | |
| | DALLKNYGLLYCFRKDM | | TCTACCCCGGAAAGCGGCTCTGCTTCTCCAGGTACTT | |
| | DKVETFLRIVQCRSVEGSC | | CTACCCCGGAAAGCGGCTCCGCATCTCCAGGTTCTA | |
| | GF | | CTAGCGAATCTCCTTCTGGTACCGCTCCAGGTACTTC | |
| | | | TACCCCTGAAAGCGGCTCCGCTTCTCCAGGTTCCACT | |
| | | | AGCTCTACCGCTGAATCTCCGGGTCCAGGTTCTACCA | |
| | | | GCGAATCTCCTTCTGGCACCGCTCCAGGTTCTACTAG | |
| | | | CGAATCCCCGTCTGGTACCGCACCAGGTACTTCTCCT | |
| | | | AGCGGCGAATCTTCTACCGCACCAGGTTCTACCAGC | |
| | | | TCTACTGCTGAATCTCCGGGTCCAGGTACTTCCCCGA | |
| | | | GCGGTGAATCTTCTACTGCACCAGGTACTTCTACTCC | |
| | | | GGAAAGCGGTTCCGCTTCTCCAGGTACCTCCCCTAG | |
| | | | CGGCGAATCTTCTACTGCTCCAGGTACCTCTCCTAGC | |
| | | | GGCGAATCTTCTACCGCTCCAGGTACCTCCCCTAGCG | |
| | | | GTGAATCTTCTACCGCACCAGGTTCTACTAGCTCTAC | |
| | | | TGCTGAATCTCCGGGTCCAGGTTCTACCAGCTCTACT | |
| | | | GCTGAATCTCCTGGTCCAGGTACCTCCCCGAGCGGT | |
| | | | GAATCTTCTACTGCACCAGGTTCTAGCCCTTCTGCTT | |
| | | | CCACCGGTACCGGCCCAGGTAGCTCTACTCCGTCTG | |
| | | | GTGCAACTGGCTCTCCAGGTAGCTCTACTCCGTCTGG | |
| | | | TGCAACCGGCTCCCCAGGTTTTCCGACTATTCCGCTG | |
| | | | TCTCGTCTGTTTGATAATGCTATGCTGCGTGCGCACC | |
| | | | GTCTGCACCAGCTGGCCTTTGATACTTACCAGGAATT | |
| | | | TGAAGAAGCcTACATTCCTAAAGAGCAGAAGTACTC | |
| | | | TTTCCTGCAAAACCCACAGACTTCTCTCTGCTTCAGC | |
| | | | GAATCTATTCCGACGCCTTCCAATCGCGAGGAAACT | |
| | | | CAGCAAAAGTCCAATCTGGAACTACTCCGCATTTCT | |
| | | | CTGCTTCTGATTCAGAGCTGGCTAGAACCAGTGCAA | |
| | | | TTTCTGCGTTCCGTCTTCGCCAATAGCCTAGTTTATG | |
| | | | GCGCATCCGACAGCAACGTATACGATCTCCTGAAAG | |
| | | | ATCTCGAGGAAGGCATTCAGACCCTGATGGGTCGTC | |
| | | | TCGAGGATGGCTCTCCGCGTACTGGTCAGATCTTCA | |
| | | | AGCAGACTTACTCTAAATTTGATACTAACAGCCACA | |
| | | | ATGACGATGCGCTTCTAAAAAACTATGGTCTGCTGT | |
| | | | ATTGTTTTCGTAAAGATATGGACAAAGTTGAAACCT | |
| | | | TCCTGCGTATTGTTCAGTGTCGTTCCGTTGAGGGCAG | |
| | | | CTGTGGTTTCTAA | |
| AG864- | GASPGTSSTGSPGSSPSAST | 693 | GGTGCTTCCCCGGGCACCAGCTCTACTGGTTCTCCAG | 694 |
| hGH | GTGPGSSPSASTGTGPGTP | | GTTCTAGCCCGTCTGCTTCTACTGGTACTGGTCCAGG | |
| | GSGTASSSPGSSTPSGATG | | TTCTAGCCCTTCTGCTTCCACTGGTACTGGTCCAGGT | |
| | SPGSNPSASTGTGPGASPG | | ACCCCGGGTAGCGGTACCGCTTCTTCTTCTCCAGGTA | |
| | TSSTGSPGTPGSGTASSSPG | | GCTCTACTCCGTCTGGTGCTACCGGCTCTCCAGGTTC | |
| | SSTPSGATGSPGTPGSGTA | | TAACCCTTCTGCATCCACCGGTACCGGCCCAGGTGCT | |
| | SSSPGASPGTSSTGSPGASP | | TCTCCGGGCACCAGCTCTACTGGTTCTCCAGGTACCC | |
| | GTSSTGSPGTPGSGTASSSP | | CGGGCAGCGGTACCGCATCTTCTTCTCCAGGTAGCTC | |
| | GSSTPSGATGSPGASPGTS | | TACTCCTTCTGGTGCAACTGGTTCTCCAGGTACTCCT | |
| | STGSPGTPGSGTASSSPGSS | | GGCAGCGGTACCGCTTCTTCTTCTCCAGGTGCTTCTC | |
| | TPSGATGSPGSNPSASTGT | | CTGGTACTAGCTCTACTGGTTCTCCAGGTGCTTCTCC | |
| | GPGSSPSASTGTGPGSSTPS | | GGGCACTAGCTCTACTGGTTCTCCAGGTACCCCGGG | |
| | GATGSPGSSTPSGATGSPG | | TAGCGGTACTGCTTCTTCCTCTCCAGGTAGCTCTACC | |
| | ASPGTSSTGSPGASPGTSST | | CCTTCTGGTGCAACCGGCTCTCCAGGTGCTTCTCCGG | |
| | GSPGASPGTSSTGSPGTPG | | GCACCAGCTCTACCGGTTCTCCAGGTACCCCGGGTA | |
| | SGTASSSPGASPGTSSTGSP | | GCGGTACCGCTTCTTCTTCTCCAGGTAGCTCTACTCC | |
| | GASPGTSSTGSPGASPGTS | | GTCTGGTGCTACCGGCTCTCCAGGTTCTAACCCTTCT | |
| | STGSPGSSPSASTGTGPGTP | | GCATCCACCGGTACCGGCCCAGGTTCTAGCCCTTCTG | |
| | GSGTASSSPGASPGTSSTG | | CTTCCACCGGTACTGGCCCAGGTAGCTCTACCCCTTC | |
| | SPGASPGTSSTGSPGASPG | | TGGTGCTACCGGCTCCCCAGGTAGCTCTACTCCTTCT | |
| | TSSTGSPGSSTPSGATGSPG | | GGTGCAACTGGCTCTCCAGGTGCATCTCCGGGCACT | |
| | SSTPSGATGSPGASPGTSST | | AGCTCTACTGGTTCTCCAGGTGCATCCCCTGGCACTA | |
| | GSPGTPGSGTASSSPGSSTP | | GCTCTACTGGTTCTCCAGGTGCTTCTCCTGGTACCAG | |
| | SGATGSPGSSTPSGATGSP | | CTCTACTGGTTCTCCAGGTACTCCTGGCAGCGGTACC | |
| | GSSTPSGATGSPGSSPSAST | | GCTTCTTCTTCTCCAGGTGCTTCTCCTGGTACTAGCT | |
| | GTGPGASPGTSSTGSPGAS | | CTACTGGTTCTCCAGGTGCTTCTCCGGGCACTAGCTC | |
| | PGTSSTGSPGTPGSGTASSS | | TACTGGTTCTCCAGGTGCTTCCCCGGGCACTAGCTCT | |
| | PGASPGTSSTGSPGASPGT | | ACCGGTTCTCCAGGTTCTAGCCCTTCTGCATCTACTG | |
| | SSTGSPGASPGTSSTGSPG | | GTACTGGCCCAGGTACTCCGGGCAGCGGTACTGCTT | |
| | ASPGTSSTGSPGTPGSGTA | | CTTCCTCTCCAGGTGCATCTCCGGGCACTAGCTCTAC | |
| | SSSPGSSTPSGATGSPGTPG | | TGGTTCTCCAGGTGCATCCCCTGGCACTAGCTCTACT | |
| | SGTASSSPGSSTPSGATGSP | | GGTTCTCCAGGTGCTTCTCCTGGTACCAGCTCTACTG | |
| | GTPGSGTASSSPGSSTPSG | | GTTCTCCAGGTAGCTCTACTCCGTCTGGTGCAACCGG | |
| | ATGSPGSSTPSGATGSPGS | | TTCCCCAGGTAGCTCTACTCCTTCTGGTGCTACTGGC | |
| | SPSASTGTGPGSSPSASTGT | | TCCCCAGGTGCATCCCCTGGCACCAGCTCTACCGGTT | |
| | GPGASPGTSSTGSPGTPGS | | CTCCAGGTACCCCGGGCAGCGGTACCGCATCTTCCT | |
| | GTASSSPGSSTPSGATGSP | | CTCCAGGTAGCTCTACCCCGTCTGGTGCTACCGGTTC | |
| | GSSPSASTGTGPGSSPSAST | | CCCAGGTAGCTCTACCCCGTCTGGTGCAACCGGCTC | |
| | GTGPGASPGTSSTGSPGAS | | CCCAGGTAGCTCTACTCCGTCTGGTGCAACCGGCTCC | |
| | PGTSSTGSPGSSTPSGATGS | | CCAGGTTCTAGCCCGTCTGCTTCCACTGGTACTGGCC | |
| | PGSSPSASTGTGPGASPGT | | CAGGTGCTTCCCCGGGCACCAGCTCTACTGGTTCTCC | |
| | SSTGSPGSSPSASTGTGPGT | | AGGTGCATCCCCGGGTACCAGCTCTACCGGTTCTCC | |
| | PGSGTASSSPGSSTPSGAT | | AGGTACTCCTGGCAGCGGTACTGCATCTTCCTCTCCA | |
| | GSPGSSTPSGATGSPGASP | | GGTGCTTCTCCGGGCACCAGCTCTACTGGTTCTCCAG | |
| | GTSSTGSPGFPTIPLSRLFD | | GTGCATCTCCGGGCACTAGCTCTACTGGTTCTCCAGG | |
| | NAMLRAHRLHQLAFDTY | | TGCATCCCCTGGCACTAGCTCTACTGGTTCTCCAGGT | |
| | QEFEEAYIPKEQKYSFLQN | | GCTTCTCCTGGTACCAGCTCTACTGGTTCTCCAGGTA | |
| | PQTSLCFSESIPTPSNREET | | CCCCTGGTAGCGGTACTGCTTCTTCCTCTCCAGGTAG | |
| | QQKSNLELLRISLLLIQSW | | CTCTACTCCGTCTGGTGCTACCGGTTCTCCAGGTACC | |
| | LEPVQFLRSVFANSLVYGA | | CCGGGTAGCGGTACCGCATCTTCTTCTCCAGGTAGCT | |
| | SDSNVYDLLKDLEEGIQTL | | CTACCCCGTCTGGTGCTACTGGTTCTCCAGGTACTCC | |
| | MGRLEDGSPRTGQIFKQT | | GGGCAGCGGTACTGCTTCTTCCTCTCCAGGTAGCTCT | |
| | YSKFDTNSHNDDALLKNY | | ACCCCTTCTGGTGCTACTGGCTCTCCAGGTAGCTCTA | |
| | GLLYCFRKDMDKVETFLR | | CCCCGTCTGGTGCTACTGGCTCCCCAGGTTCTAGCCC | |
| | IVQCRSVEGSCGF | | TTCTGCATCCACCGGTACCGGTCCAGGTTCTAGCCCG | |
| | | | TCTGCATCTACTGGTACTGGTCCAGGTGCATCCCCGG | |
| | | | GCACTAGCTCTACCGGTTCTCCAGGTACTCCTGGTAG | |
| | | | CGGTACTGCTTCTTCTTCTCCAGGTAGCTCTACTCCT | |
| | | | TCTGGTGCTACTGGTTCTCCAGGTTCTAGCCCTTCTG | |
| | | | CATCCACCGGTACCGGCCCAGGTTCTAGCCCGTCTG | |
| | | | CTTCTACCGGTACTGGTCCAGGTGCTTCTCCGGGTAC | |
| | | | TAGCTCTACTGGTTCTCCAGGTGCATCTCCTGGTACT | |
| | | | AGCTCTACTGGTTCTCCAGGTAGCTCTACTCCGTCTG | |
| | | | GTGCAACCGGCTCTCCAGGTTCTAGCCCTTCTGCATC | |
| | | | TACCGGTACTGGTCCAGGTGCATCCCCTGGTACCAG | |
| | | | CTCTACCGGTTCTCCAGGTTCTAGCCCTTCTGCTTCT | |
| | | | ACCGGTACCGGTCCAGGTACCCCTGGCAGCGGTACC | |
| | | | GCATCTTCCTCTCCAGGTAGCTCTACTCCGTCTGGTG | |
| | | | CAACCGGTTCCCCAGGTAGCTCTACTCCTTCTGGTGC | |
| | | | TACTGGCTCCCCAGGTGCATCCCCTGGCACCAGCTCT | |
| | | | ACCGGTTCTCCAGGTTTTCCGACTATTCCGCTGTCTC | |
| | | | GTCTGTTTGATAATGCTATGCTGCGTGCGCACCGTCT | |
| | | | GCACCAGCTGGCCTTTGATACTTACCAGGAATTTGA | |
| | | | AGAAGCcTACATTCCTAAAGAGCAGAAGTACTCTTTC | |
| | | | CTGCAAAACCCACAGACTTCTCTCTGCTTCAGCGAAT | |
| | | | CTATTCCGACGCCTTCCAATCGCGAGGAAACTCAGC | |
| | | | AAAAGTCCAATCTGGAACTACTCCGCATTTCTCTGCT | |
| | | | TCTGATTCAGAGCTGGCTAGAACCAGTGCAATTTCT | |
| | | | GCGTTCCGTCTTCGCCAATAGCCTAGTTTATGGCGCA | |
| | | | TCCGACAGCAACGTATACGATCTCCTGAAAGATCTC | |
| | | | GAGGAAGGCATTCAGACCCTGATGGGTCGTCTCGAG | |
| | | | GATGGCTCTCCGCGTACTGGTCAGATCTTCAAGCAG | |
| | | | ACTTACTCTAAATTTGATACTAACAGCCACAATGAC | |
| | | | GATGCGCTTCTAAAAAACTATGGTCTGCTGTATTGTT | |
| | | | TTCGTAAAGATATGGACAAAGTTGAAACCTTCCTGC | |
| | | | GTATTGTTCAGTGTCGTTCCGTTGAGGGCAGCTGTGG | |
| | | | TTTCTAA | |
| AM875- | GTSTEPSEGSAPGSEPATS | 695 | GGTACTTCTACTGAACCGTCTGAAGGCAGCGCACCA | 696 |
| hGH | GSETPGSPAGSPTSTEEGST | | GGTAGCGAACCGGCTACTTCCGGTTCTGAAACCCCA | |
| | SSTAESPGPGTSTPESGSAS | | GGTAGCCCAGCAGGTTCTCCAACTTCTACTGAAGAA | |
| | PGSTSESPSGTAPGSTSESP | | GGTTCTACCAGCTCTACCGCAGAATCTCCTGGTCCAG | |
| | SGTAPGTSTPESGSASPGTS | | GTACCTCTACTCCGGAAAGCGGCTCTGCATCTCCAG | |
| | TPESGSASPGSEPATSGSET | | GTTCTACTAGCGAATCTCCTTCTGGCACTGCACCAGG | |
| | PGTSESATPESGPGSPAGSP | | TTCTACTAGCGAATCCCCGTCTGGTACTGCTCCAGGT | |
| | TSTEEGTSTEPSEGSAPGTS | | ACTTCTACTCCTGAAAGCGGTTCCGCTTCTCCAGGTA | |
| | ESATPESGPGTSTEPSEGSA | | CCTCTACTCCGGAAAGCGGTTCTGCATCTCCAGGTA | |
| | PGTSTEPSEGSAPGSPAGSP | | GCGAACCGGCAACCTCCGGCTCTGAAACCCCAGGTA | |
| | TSTEEGTSTEPSEGSAPGTS | | CCTCTGAAAGCGCTACTCCTGAATCCGGCCCAGGTA | |
| | TEPSEGSAPGTSESATPESG | | GCCCGGCAGGTTCTCCGACTTCCACTGAGGAAGGTA | |
| | PGTSESATPESGPGTSTEPS | | CCTCTACTGAACCTTCTGAGGGCAGCGCTCCAGGTA | |
| | EGSAPGTSTEPSEGSAPGT | | CTTCTGAAAGCGCTACCCCGGAGTCCGGTCCAGGTA | |
| | SESATPESGPGTSTEPSEGS | | CTTCTACTGAACCGTCCGAAGGTAGCGCACCAGGTA | |
| | APGSEPATSGSETPGSPAG | | CTTCTACCGAACCGTCCGAGGGTAGCGCACCAGGTA | |
| | SPTSTEEGSSTPSGATGSPG | | GCCCAGCAGGTTCTCCTACCTCCACCGAGGAAGGTA | |
| | TPGSGTASSSPGSSTPSGAT | | CTTCTACCGAACCGTCCGAGGGTAGCGCACCAGGTA | |
| | GSPGTSTEPSEGSAPGTSTE | | CTTCTACCGAACCTTCCGAGGGCAGCGCACCAGGTA | |
| | PSEGSAPGSEPATSGSETPG | | CTTCTGAAAGCGCTACCCCTGAGTCCGGCCCAGGTA | |
| | SPAGSPTSTEEGSPAGSPTS | | CTTCTGAAAGCGCTACTCCTGAATCCGGTCCAGGTA | |
| | TEEGTSTEPSEGSAPGASA | | CCTCTACTGAACCTTCCGAAGGCAGCGCTCCAGGTA | |
| | SGAPSTGGTSESATPESGP | | CCTCTACCGAACCGTCCGAGGGCAGCGCACCAGGTA | |
| | GSPAGSPTSTEEGSPAGSPT | | CTTCTGAAAGCGCAACCCCTGAATCCGGTCCAGGTA | |
| | STEEGSTSSTAESPGPGSTS | | CTTCTACTGAACCTTCCGAAGGTAGCGCTCCAGGTA | |
| | ESPSGTAPGTSPSGESSTAP | | GCGAACCTGCTACTTCTGGTTCTGAAACCCCAGGTA | |
| | GTPGSGTASSSPGSSTPSG | | GCCCGGCTGGCTCTCCGACCTCCACCGAGGAAGGTA | |
| | ATGSPGSSPSASTGTGPGS | | GCTCTACCCCGTCTGGTGCTACTGGTTCTCCAGGTAC | |
| | EPATSGSETPGTSESATPES | | TCCGGGCAGCGGTACTGCTTCTTCCTCTCCAGGTAGC | |
| | GPGSEPATSGSETPGSTSST | | TCTACCCCTTCTGGTGCTACTGGCTCTCCAGGTACCT | |
| | AESPGPGSTSSTAESPGPGT | | CTACCGAACCGTCCGAGGGTAGCGCACCAGGTACCT | |
| | SPSGESSTAPGSEPATSGSE | | CTACTGAACCGTCTGAGGGTAGCGCTCCAGGTAGCG | |
| | TPGSEPATSGSETPGTSTEP | | AACCGGCAACCTCCGGTTCTGAAACTCCAGGTAGCC | |
| | SEGSAPGSTSSTAESPGPGT | | CTGCTGGCTCTCCGACTTCTACTGAGGAAGGTAGCC | |
| | STPESGSASPGSTSESPSGT | | CGGCTGGTTCTCCGACTTCTACTGAGGAAGGTACTTC | |
| | APGTSTEPSEGSAPGTSTEP | | TACCGAACCTTCCGAAGGTAGCGCTCCAGGTGCAAG | |
| | SEGSAPGTSTEPSEGSAPGS | | CGCAAGCGGCGCGCCAAGCACGGGAGGTACTTCTGA | |
| | STPSGATGSPGSSPSASTGT | | AAGCGCTACTCCTGAGTCCGGCCCAGGTAGCCCGGC | |
| | GPGASPGTSSTGSPGSEPA | | TGGCTCTCCGACTTCCACCGAGGAAGGTAGCCCGGC | |
| | TSGSETPGTSESATPESGPG | | TGGCTCTCCAACTTCTACTGAAGAAGGTTCTACCAGC | |
| | SPAGSPTSTEEGSSTPSGAT | | TCTACCGCTGAATCTCCTGGCCCAGGTTCTACTAGCG | |
| | GSPGSSPSASTGTGPGASP | | AATCTCCGTCTGGCACCGCACCAGGTACTTCCCCTAG | |
| | GTSSTGSPGTSESATPESGP | | CGGTGAATCTTCTACTGCACCAGGTACCCCTGGCAG | |
| | GTSTEPSEGSAPGTSTEPSE | | CGGTACCGCTTCTTCCTCTCCAGGTAGCTCTACCCCG | |
| | GSAPGFPTIPLSRLFDNAM | | TCTGGTGCTACTGGCTCTCCAGGTTCTAGCCCGTCTG | |
| | LRAHRLHQLAFDTYQEFE | | CATCTACCGGTACCGGCCCAGGTAGCGAACCGGCAA | |
| | EAYIPKEQKYSFLQNPQTS | | CCTCCGGCTCTGAAACTCCAGGTACTTCTGAAAGCG | |
| | LCFSESIPTPSNREETQQKS | | CTACTCCGGAATCCGGCCCAGGTAGCGAACCGGCTA | |
| | NLELLRISLLLIQSWLEPVQ | | CTTCCGGCTCTGAAACCCCAGGTTCCACCAGCTCTAC | |
| | FLRSVFANSLVYGASDSN | | TGCAGAATCTCCGGGCCCAGGTTCTACTAGCTCTACT | |
| | VYDLLKDLEEGIQTLMGR | | GCAGAATCTCCGGGTCCAGGTACTTCTCCTAGCGGC | |
| | LEDGSPRTGQIFKQTYSKF | | GAATCTTCTACCGCTCCAGGTAGCGAACCGGCAACC | |
| | DTNSHNDDALLKNYGLLY | | TCTGGCTCTGAAACTCCAGGTAGCGAACCTGCAACC | |
| | CFRKDMDKVETFLRIVQC | | TCCGGCTCTGAAACCCCAGGTACTTCTACTGAACCTT | |
| | RSVEGSCGF | | CTGAGGGCAGCGCACCAGGTTCTACCAGCTCTACCG | |
| | | | CAGAATCTCCTGGTCCAGGTACCTCTACTCCGGAAA | |
| | | | GCGGCTCTGCATCTCCAGGTTCTACTAGCGAATCTCC | |
| | | | TTCTGGCACTGCACCAGGTACTTCTACCGAACCGTCC | |
| | | | GAAGGCAGCGCTCCAGGTACCTCTACTGAACCTTCC | |
| | | | GAGGGCAGCGCTCCAGGTACCTCTACCGAACCTTCT | |
| | | | GAAGGTAGCGCACCAGGTAGCTCTACTCCGTCTGGT | |
| | | | GCAACCGGCTCCCCAGGTTCTAGCCCGTCTGCTTCCA | |
| | | | CTGGTACTGGCCCAGGTGCTTCCCCGGGCACCAGCT | |
| | | | CTACTGGTTCTCCAGGTAGCGAACCTGCTACCTCCGG | |
| | | | TTCTGAAACCCCAGGTACCTCTGAAAGCGCAACTCC | |
| | | | GGAGTCTGGTCCAGGTAGCCCTGCAGGTTCTCCTAC | |
| | | | CTCCACTGAGGAAGGTAGCTCTACTCCGTCTGGTGC | |
| | | | AACCGGCTCCCCAGGTTCTAGCCCGTCTGCTTCCACT | |
| | | | GGTACTGGCCCAGGTGCTTCCCCGGGCACCAGCTCT | |
| | | | ACTGGTTCTCCAGGTACCTCTGAAAGCGCTACTCCG | |
| | | | GAGTCTGGCCCAGGTACCTCTACTGAACCGTCTGAG | |
| | | | GGTAGCGCTCCAGGTACTTCTACTGAACCGTCCGAA | |
| | | | GGTAGCGCACCAGGTTTTCCGACTATTCCGCTGTCTC | |
| | | | GTCTGTTTGATAATGCTATGCTGCGTGCGCACCGTCT | |
| | | | GCACCAGCTGGCCTTTGATACTTACCAGGAATTTGA | |
| | | | AGAAGCcTACATTCCTAAAGAGCAGAAGTACTCTTTC | |
| | | | CTGCAAAACCCACAGACTTCTCTCTGCTTCAGCGAAT | |
| | | | CTATTCCGACGCCTTCCAATCGCGAGGAAACTCAGC | |
| | | | AAAAGTCCAATCTGGAACTACTCCGCATTTCTCTGCT | |
| | | | TCTGATTCAGAGCTGGCTAGAACCAGTGCAATTTCT | |
| | | | GCGTTCCGTCTTCGCCAATAGCCTAGTTTATGGCGCA | |
| | | | TCCGACAGCAACGTATACGATCTCCTGAAAGATCTC | |
| | | | GAGGAAGGCATTCAGACCCTGATGGGTCGTCTCGAG | |
| | | | GATGGCTCTCCGCGTACTGGTCAGATCTTCAAGCAG | |
| | | | ACTTACTCTAAATTTGATACTAACAGCCACAATGAC | |
| | | | GATGCGCTTCTAAAAAACTATGGTCTGCTGTATTGTT | |
| | | | TTCGTAAAGATATGGACAAAGTTGAAACCTTCCTGC | |
| | | | GTATTGTTCAGTGTCGTTCCGTTGAGGGCAGCTGTGG | |
| | | | TTTCTAA | |
| AE912- | MAEPAGSPTSTEEGTPGSG | 697 | ATGGCTGAACCTGCTGGCTCTCCAACCTCCACTGAG | 698 |
| hGH | TASSSPGSSTPSGATGSPG | | GAAGGTACCCCGGGTAGCGGTACTGCTTCTTCCTCTC | |
| | ASPGTSSTGSPGSPAGSPTS | | CAGGTAGCTCTACCCCTTCTGGTGCAACCGGCTCTCC | |
| | TEEGTSESATPESGPGTSTE | | AGGTGCTTCTCCGGGCACCAGCTCTACCGGTTCTCCA | |
| | PSEGSAPGSPAGSPTSTEEG | | GGTAGCCCGGCTGGCTCTCCTACCTCTACTGAGGAA | |
| | TSTEPSEGSAPGTSTEPSEG | | GGTACTTCTGAAAGCGCTACTCCTGAGTCTGGTCCA | |
| | SAPGTSESATPESGPGSEPA | | GGTACCTCTACTGAACCGTCCGAAGGTAGCGCTCCA | |
| | TSGSETPGSEPATSGSETPG | | GGTAGCCCAGCAGGCTCTCCGACTTCCACTGAGGAA | |
| | SPAGSPTSTEEGTSESATPE | | GGTACTTCTACTGAACCTTCCGAAGGCAGCGCACCA | |
| | SGPGTSTEPSEGSAPGTSTE | | GGTACCTCTACTGAACCTTCTGAGGGCAGCGCTCCA | |
| | PSEGSAPGSPAGSPTSTEEG | | GGTACTTCTGAAAGCGCTACCCCGGAATCTGGCCCA | |
| | TSTEPSEGSAPGTSTEPSEG | | GGTAGCGAACCGGCTACTTCTGGTTCTGAAACCCCA | |
| | SAPGTSESATPESGPGTSTE | | GGTAGCGAACCGGCTACCTCCGGTTCTGAAACTCCA | |
| | PSEGSAPGTSESATPESGPG | | GGTAGCCCGGCAGGCTCTCCGACCTCTACTGAGGAA | |
| | SEPATSGSETPGTSTEPSEG | | GGTACTTCTGAAAGCGCAACCCCGGAGTCCGGCCCA | |
| | SAPGTSTEPSEGSAPGTSES | | GGTACCTCTACCGAACCGTCTGAGGGCAGCGCACCA | |
| | ATPESGPGTSESATPESGP | | GGTACTTCTACCGAACCGTCCGAGGGTAGCGCACCA | |
| | GSPAGSPTSTEEGTSESATP | | GGTAGCCCAGCAGGTTCTCCTACCTCCACCGAGGAA | |
| | ESGPGSEPATSGSETPGTSE | | GGTACTTCTACCGAACCGTCCGAGGGTAGCGCACCA | |
| | SATPESGPGTSTEPSEGSAP | | GGTACCTCTACTGAACCTTCTGAGGGCAGCGCTCCA | |
| | GTSTEPSEGSAPGTSTEPSE | | GGTACTTCTGAAAGCGCTACCCCGGAGTCCGGTCCA | |
| | GSAPGTSTEPSEGSAPGTS | | GGTACTTCTACTGAACCGTCCGAAGGTAGCGCACCA | |
| | TEPSEGSAPGTSTEPSEGSA | | GGTACTTCTGAAAGCGCAACCCCTGAATCCGGTCCA | |
| | PGSPAGSPTSTEEGTSTEPS | | GGTAGCGAACCGGCTACTTCTGGCTCTGAGACTCCA | |
| | EGSAPGTSESATPESGPGS | | GGTACTTCTACCGAACCGTCCGAAGGTAGCGCACCA | |
| | EPATSGSETPGTSESATPES | | GGTACTTCTACTGAACCGTCTGAAGGTAGCGCACCA | |
| | GPGSEPATSGSETPGTSES | | GGTACTTCTGAAAGCGCAACCCCGGAATCCGGCCCA | |
| | ATPESGPGTSTEPSEGSAP | | GGTACCTCTGAAAGCGCAACCCCGGAGTCCGGCCCA | |
| | GTSESATPESGPGSPAGSPT | | GGTAGCCCTGCTGGCTCTCCAACCTCCACCGAAGAA | |
| | STEEGSPAGSPTSTEEGSPA | | GGTACCTCTGAAAGCGCAACCCCTGAATCCGGCCCA | |
| | GSPTSTEEGTSESATPESGP | | GGTAGCGAACCGGCAACCTCCGGTTCTGAAACCCCA | |
| | GTSTEPSEGSAPGTSESATP | | GGTACCTCTGAAAGCGCTACTCCGGAGTCTGGCCCA | |
| | ESGPGSEPATSGSETPGTSE | | GGTACCTCTACTGAACCGTCTGAGGGTAGCGCTCCA | |
| | SATPESGPGSEPATSGSETP | | GGTACTTCTACTGAACCGTCCGAAGGTAGCGCACCA | |
| | GTSESATPESGPGTSTEPSE | | GGTACTTCTACCGAACCGTCCGAAGGCAGCGCTCCA | |
| | GSAPGSPAGSPTSTEEGTS | | GGTACCTCTACTGAACCTTCCGAGGGCAGCGCTCCA | |
| | ESATPESGPGSEPATSGSET | | GGTACCTCTACCGAACCTTCTGAAGGTAGCGCACCA | |
| | PGTSESATPESGPGSPAGSP | | GGTACTTCTACCGAACCGTCCGAGGGTAGCGCACCA | |
| | TSTEEGSPAGSPTSTEEGTS | | GGTAGCCCAGCAGGTTCTCCTACCTCCACCGAGGAA | |
| | TEPSEGSAPGTSESATPESG | | GGTACTTCTACCGAACCGTCCGAGGGTAGCGCACCA | |
| | PGTSESATPESGPGTSESAT | | GGTACCTCTGAAAGCGCAACTCCTGAGTCTGGCCCA | |
| | PESGPGSEPATSGSETPGSE | | GGTAGCGAACCTGCTACCTCCGGCTCTGAGACTCCA | |
| | PATSGSETPGSPAGSPTSTE | | GGTACCTCTGAAAGCGCAACCCCGGAATCTGGTCCA | |
| | EGTSTEPSEGSAPGTSTEPS | | GGTAGCGAACCTGCAACCTCTGGCTCTGAAACCCCA | |
| | EGSAPGSEPATSGSETPGT | | GGTACCTCTGAAAGCGCTACTCCTGAATCTGGCCCA | |
| | SESATPESGPGTSTEPSEGS | | GGTACTTCTACTGAACCGTCCGAGGGCAGCGCACCA | |
| | APGFPTIPLSRLFDNAMLR | | GGTACTTCTGAAAGCGCTACTCCTGAGTCCGGCCCA | |
| | AHRLHQLAFDTYQEFEEA | | GGTAGCCCGGCTGGCTCTCCGACTTCCACCGAGGAA | |
| | YIPKEQKYSFLQNPQTSLC | | GGTAGCCCGGCTGGCTCTCCAACTTCTACTGAAGAA | |
| | FSESIPTPSNREETQQKSNL | | GGTAGCCCGGCAGGCTCTCCGACCTCTACTGAGGAA | |
| | ELLRISLLLIQSWLEPVQFL | | GGTACTTCTGAAAGCGCAACCCCGGAGTCCGGCCCA | |
| | RSVFANSLVYGASDSNVY | | GGTACCTCTACCGAACCGTCTGAGGGCAGCGCACCA | |
| | DLLKDLEEGIQTLMGRLE | | GGTACCTCTGAAAGCGCAACTCCTGAGTCTGGCCCA | |
| | DGSPRTGQIFKQTYSKFDT | | GGTAGCGAACCTGCTACCTCCGGCTCTGAGACTCCA | |
| | NSHNDDALLKNYGLLYCF | | GGTACCTCTGAAAGCGCAACCCCGGAATCTGGTCCA | |
| | RKDMDKVETFLRIVQCRS | | GGTAGCGAACCTGCAACCTCTGGCTCTGAAACCCCA | |
| | VEGSCGF | | GGTACCTCTGAAAGCGCTACTCCTGAATCTGGCCCA | |
| | | | GGTACTTCTACTGAACCGTCCGAGGGCAGCGCACCA | |
| | | | GGTAGCCCTGCTGGCTCTCCAACCTCCACCGAAGAA | |
| | | | GGTACCTCTGAAAGCGCAACCCCTGAATCCGGCCCA | |
| | | | GGTAGCGAACCGGCAACCTCCGGTTCTGAAACCCCA | |
| | | | GGTACTTCTGAAAGCGCTACTCCTGAGTCCGGCCCA | |
| | | | GGTAGCCCGGCTGGCTCTCCGACTTCCACCGAGGAA | |
| | | | GGTAGCCCGGCTGGCTCTCCAACTTCTACTGAAGAA | |
| | | | GGTACTTCTACCGAACCTTCCGAGGGCAGCGCACCA | |
| | | | GGTACTTCTGAAAGCGCTACCCCTGAGTCCGGCCCA | |
| | | | GGTACTTCTGAAAGCGCTACTCCTGAATCCGGTCCA | |
| | | | GGTACTTCTGAAAGCGCTACCCCGGAATCTGGCCCA | |
| | | | GGTAGCGAACCGGCTACTTCTGGTTCTGAAACCCCA | |
| | | | GGTAGCGAACCGGCTACCTCCGGTTCTGAAACTCCA | |
| | | | GGTAGCCCAGCAGGCTCTCCGACTTCCACTGAGGAA | |
| | | | GGTACTTCTACTGAACCTTCCGAAGGCAGCGCACCA | |
| | | | GGTACCTCTACTGAACCTTCTGAGGGCAGCGCTCCA | |
| | | | GGTAGCGAACCTGCAACCTCTGGCTCTGAAACCCCA | |
| | | | GGTACCTCTGAAAGCGCTACTCCTGAATCTGGCCCA | |
| | | | GGTACTTCTACTGAACCGTCCGAGGGCAGCGCACCA | |
| | | | GGTTTTCCGACTATTCCGCTGTCTCGTCTGTTTGATA | |
| | | | ATGCTATGCTGCGTGCGCACCGTCTGCACCAGCTGG | |
| | | | CCTTTGATACTTACCAGGAATTTGAAGAAGCcTACAT | |
| | | | TCCTAAAGAGCAGAAGTACTCTTTCCTGCAAAACCC | |
| | | | ACAGACTTCTCTCTGCTTCAGCGAATCTATTCCGACG | |
| | | | CCTTCCAATCGCGAGGAAACTCAGCAAAAGTCCAAT | |
| | | | CTGGAACTACTCCGCATTTCTCTGCTTCTGATTCAGA | |
| | | | GCTGGCTAGAACCAGTGCAATTTCTGCGTTCCGTCTT | |
| | | | CGCCAATAGCCTAGTTTATGGCGCATCCGACAGCAA | |
| | | | CGTATACGATCTCCTGAAAGATCTCGAGGAAGGCAT | |
| | | | TCAGACCCTGATGGGTCGTCTCGAGGATGGCTCTCC | |
| | | | GCGTACTGGTCAGATCTTCAAGCAGACTTACTCTAA | |
| | | | ATTTGATACTAACAGCCACAATGACGATGCGCTTCT | |
| | | | AAAAAACTATGGTCTGCTGTATTGTTTTCGTAAAGAT | |
| | | | ATGGACAAAGTTGAAACCTTCCTGCGTATTGTTCAGT | |
| | | | GTCGTTCCGTTGAGGGCAGCTGTGGTTTCTAA | |
| AM923- | MAEPAGSPTSTEEGASPGT | 699 | ATGGCTGAACCTGCTGGCTCTCCAACCTCCACTGAG | 700 |
| hGH | SSTGSPGSSTPSGATGSPGS | | GAAGGTGCATCCCCGGGCACCAGCTCTACCGGTTCT | |
| | STPSGATGSPGTSTEPSEGS | | CCAGGTAGCTCTACCCCGTCTGGTGCTACCGGCTCTC | |
| | APGSEPATSGSETPGSPAG | | CAGGTAGCTCTACCCCGTCTGGTGCTACTGGCTCTCC | |
| | SPTSTEEGSTSSTAESPGPG | | AGGTACTTCTACTGAACCGTCTGAAGGCAGCGCACC | |
| | TSTPESGSASPGSTSESPSG | | AGGTAGCGAACCGGCTACTTCCGGTTCTGAAACCCC | |
| | TAPGSTSESPSGTAPGTSTP | | AGGTAGCCCAGCAGGTTCTCCAACTTCTACTGAAGA | |
| | ESGSASPGTSTPESGSASPG | | AGGTTCTACCAGCTCTACCGCAGAATCTCCTGGTCCA | |
| | SEPATSGSETPGTSESATPE | | GGTACCTCTACTCCGGAAAGCGGCTCTGCATCTCCA | |
| | SGPGSPAGSPTSTEEGTSTE | | GGTTCTACTAGCGAATCTCCTTCTGGCACTGCACCAG | |
| | PSEGSAPGTSESATPESGPG | | GTTCTACTAGCGAATCCCCGTCTGGTACTGCTCCAGG | |
| | TSTEPSEGSAPGTSTEPSEG | | TACTTCTACTCCTGAAAGCGGTTCCGCTTCTCCAGGT | |
| | SAPGSPAGSPTSTEEGTSTE | | ACCTCTACTCCGGAAAGCGGTTCTGCATCTCCAGGT | |
| | PSEGSAPGTSTEPSEGSAPG | | AGCGAACCGGCAACCTCCGGCTCTGAAACCCCAGGT | |
| | TSESATPESGPGTSESATPE | | ACCTCTGAAAGCGCTACTCCTGAATCCGGCCCAGGT | |
| | SGPGTSTEPSEGSAPGTSTE | | AGCCCGGCAGGTTCTCCGACTTCCACTGAGGAAGGT | |
| | PSEGSAPGTSESATPESGPG | | ACCTCTACTGAACCTTCTGAGGGCAGCGCTCCAGGT | |
| | TSTEPSEGSAPGSEPATSGS | | ACTTCTGAAAGCGCTACCCCGGAGTCCGGTCCAGGT | |
| | ETPGSPAGSPTSTEEGSSTP | | ACTTCTACTGAACCGTCCGAAGGTAGCGCACCAGGT | |
| | SGATGSPGTPGSGTASSSP | | ACTTCTACCGAACCGTCCGAGGGTAGCGCACCAGGT | |
| | GSSTPSGATGSPGTSTEPSE | | AGCCCAGCAGGTTCTCCTACCTCCACCGAGGAAGGT | |
| | GSAPGTSTEPSEGSAPGSEP | | ACTTCTACCGAACCGTCCGAGGGTAGCGCACCAGGT | |
| | ATSGSETPGSPAGSPTSTEE | | ACTTCTACCGAACCTTCCGAGGGCAGCGCACCAGGT | |
| | GSPAGSPTSTEEGTSTEPSE | | ACTTCTGAAAGCGCTACCCCTGAGTCCGGCCCAGGT | |
| | GSAPGASASGAPSTGGTSE | | ACTTCTGAAAGCGCTACTCCTGAATCCGGTCCAGGT | |
| | SATPESGPGSPAGSPTSTEE | | ACCTCTACTGAACCTTCCGAAGGCAGCGCTCCAGGT | |
| | GSPAGSPTSTEEGSTSSTAE | | ACCTCTACCGAACCGTCCGAGGGCAGCGCACCAGGT | |
| | SPGPGSTSESPSGTAPGTSP | | ACTTCTGAAAGCGCAACCCCTGAATCCGGTCCAGGT | |
| | SGESSTAPGTPGSGTASSSP | | ACTTCTACTGAACCTTCCGAAGGTAGCGCTCCAGGT | |
| | GSSTPSGATGSPGSSPSAST | | AGCGAACCTGCTACTTCTGGTTCTGAAACCCCAGGT | |
| | GTGPGSEPATSGSETPGTS | | AGCCCGGCTGGCTCTCCGACCTCCACCGAGGAAGGT | |
| | ESATPESGPGSEPATSGSET | | AGCTCTACCCCGTCTGGTGCTACTGGTTCTCCAGGTA | |
| | PGSTSSTAESPGPGSTSSTA | | CTCCGGGCAGCGGTACTGCTTCTTCCTCTCCAGGTAG | |
| | ESPGPGTSPSGESSTAPGSE | | CTCTACCCCTTCTGGTGCTACTGGCTCTCCAGGTACC | |
| | PATSGSETPGSEPATSGSET | | TCTACCGAACCGTCCGAGGGTAGCGCACCAGGTACC | |
| | PGTSTEPSEGSAPGSTSSTA | | TCTACTGAACCGTCTGAGGGTAGCGCTCCAGGTAGC | |
| | ESPGPGTSTPESGSASPGST | | GAACCGGCAACCTCCGGTTCTGAAACTCCAGGTAGC | |
| | SESPSGTAPGTSTEPSEGSA | | CCTGCTGGCTCTCCGACTTCTACTGAGGAAGGTAGC | |
| | PGTSTEPSEGSAPGTSTEPS | | CCGGCTGGTTCTCCGACTTCTACTGAGGAAGGTACTT | |
| | EGSAPGSSTPSGATGSPGS | | CTACCGAACCTTCCGAAGGTAGCGCTCCAGGTGCAA | |
| | SPSASTGTGPGASPGTSST | | GCGCAAGCGGCGCGCCAAGCACGGGAGGTACTTCTG | |
| | GSPGSEPATSGSETPGTSES | | AAAGCGCTACTCCTGAGTCCGGCCCAGGTAGCCCGG | |
| | ATPESGPGSPAGSPTSTEE | | CTGGCTCTCCGACTTCCACCGAGGAAGGTAGCCCGG | |
| | GSSTPSGATGSPGSSPSAST | | CTGGCTCTCCAACTTCTACTGAAGAAGGTTCTACCAG | |
| | GTGPGASPGTSSTGSPGTS | | CTCTACCGCTGAATCTCCTGGCCCAGGTTCTACTAGC | |
| | ESATPESGPGTSTEPSEGSA | | GAATCTCCGTCTGGCACCGCACCAGGTACTTCCCCTA | |
| | PGTSTEPSEGSAPGFPTIPL | | GCGGTGAATCTTCTACTGCACCAGGTACCCCTGGCA | |
| | SRLFDNAMLRAHRLHQLA | | GCGGTACCGCTTCTTCCTCTCCAGGTAGCTCTACCCC | |
| | FDTYQEFEEAYIPKEQKYS | | GTCTGGTGCTACTGGCTCTCCAGGTTCTAGCCCGTCT | |
| | FLQNPQTSLCFSESIPTPSN | | GCATCTACCGGTACCGGCCCAGGTAGCGAACCGGCA | |
| | REETQQKSNLELLRISLLLI | | ACCTCCGGCTCTGAAACTCCAGGTACTTCTGAAAGC | |
| | QSWLEPVQFLRSVFANSL | | GCTACTCCGGAATCCGGCCCAGGTAGCGAACCGGCT | |
| | VYGASDSNVYDLLKDLEE | | ACTTCCGGCTCTGAAACCCCAGGTTCCACCAGCTCTA | |
| | GIQTLMGRLEDGSPRTGQI | | CTGCAGAATCTCCGGGCCCAGGTTCTACTAGCTCTAC | |
| | FKQTYSKFDTNSHNDDAL | | TGCAGAATCTCCGGGTCCAGGTACTTCTCCTAGCGG | |
| | LKNYGLLYCFRKDMDKV | | CGAATCTTCTACCGCTCCAGGTAGCGAACCGGCAAC | |
| | ETFLRIVQCRSVEGSCGF | | CTCTGGCTCTGAAACTCCAGGTAGCGAACCTGCAAC | |
| | | | CTCCGGCTCTGAAACCCCAGGTACTTCTACTGAACCT | |
| | | | TCTGAGGGCAGCGCACCAGGTTCTACCAGCTCTACC | |
| | | | GCAGAATCTCCTGGTCCAGGTACCTCTACTCCGGAA | |
| | | | AGCGGCTCTGCATCTCCAGGTTCTACTAGCGAATCTC | |
| | | | CTTCTGGCACTGCACCAGGTACTTCTACCGAACCGTC | |
| | | | CGAAGGCAGCGCTCCAGGTACCTCTACTGAACCTTC | |
| | | | CGAGGGCAGCGCTCCAGGTACCTCTACCGAACCTTC | |
| | | | TGAAGGTAGCGCACCAGGTAGCTCTACTCCGTCTGG | |
| | | | TGCAACCGGCTCCCCAGGTTCTAGCCCGTCTGCTTCC | |
| | | | ACTGGTACTGGCCCAGGTGCTTCCCCGGGCACCAGC | |
| | | | TCTACTGGTTCTCCAGGTAGCGAACCTGCTACCTCCG | |
| | | | GTTCTGAAACCCCAGGTACCTCTGAAAGCGCAACTC | |
| | | | CGGAGTCTGGTCCAGGTAGCCCTGCAGGTTCTCCTA | |
| | | | CCTCCACTGAGGAAGGTAGCTCTACTCCGTCTGGTG | |
| | | | CAACCGGCTCCCCAGGTTCTAGCCCGTCTGCTTCCAC | |
| | | | TGGTACTGGCCCAGGTGCTTCCCCGGGCACCAGCTC | |
| | | | TACTGGTTCTCCAGGTACCTCTGAAAGCGCTACTCCG | |
| | | | GAGTCTGGCCCAGGTACCTCTACTGAACCGTCTGAG | |
| | | | GGTAGCGCTCCAGGTACTTCTACTGAACCGTCCGAA | |
| | | | GGTAGCGCACCAGGTTTTCCGACTATTCCGCTGTCTC | |
| | | | GTCTGTTTGATAATGCTATGCTGCGTGCGCACCGTCT | |
| | | | GCACCAGCTGGCCTTTGATACTTACCAGGAATTTGA | |
| | | | AGAAGCcTACATTCCTAAAGAGCAGAAGTACTCTTTC | |
| | | | CTGCAAAACCCACAGACTTCTCTCTGCTTCAGCGAAT | |
| | | | CTATTCCGACGCCTTCCAATCGCGAGGAAACTCAGC | |
| | | | AAAAGTCCAATCTGGAACTACTCCGCATTTCTCTGCT | |
| | | | TCTGATTCAGAGCTGGCTAGAACCAGTGCAATTTCT | |
| | | | GCGTTCCGTCTTCGCCAATAGCCTAGTTTATGGCGCA | |
| | | | TCCGACAGCAACGTATACGATCTCCTGAAAGATCTC | |
| | | | GAGGAAGGCATTCAGACCCTGATGGGTCGTCTCGAG | |
| | | | GATGGCTCTCCGCGTACTGGTCAGATCTTCAAGCAG | |
| | | | ACTTACTCTAAATTTGATACTAACAGCCACAATGAC | |
| | | | GATGCGCTTCTAAAAAACTATGGTCTGCTGTATTGTT | |
| | | | TTCGTAAAGATATGGACAAAGTTGAAACCTTCCTGC | |
| | | | GTATTGTTCAGTGTCGTTCCGTTGAGGGCAGCTGTGG | |
| | | | TTTCTAA | |
| AM1318- | GTSTEPSEGSAPGSEPATS | 701 | GGTACTTCTACTGAACCGTCTGAAGGCAGCGCACCA | 702 |
| hGH | GSETPGSPAGSPTSTEEGST | | GGTAGCGAACCGGCTACTTCCGGTTCTGAAACCCCA | |
| | SSTAESPGPGTSTPESGSAS | | GGTAGCCCAGCAGGTTCTCCAACTTCTACTGAAGAA | |
| | PGSTSESPSGTAPGSTSESP | | GGTTCTACCAGCTCTACCGCAGAATCTCCTGGTCCAG | |
| | SGTAPGTSTPESGSASPGTS | | GTACCTCTACTCCGGAAAGCGGCTCTGCATCTCCAG | |
| | TPESGSASPGSEPATSGSET | | GTTCTACTAGCGAATCTCCTTCTGGCACTGCACCAGG | |
| | PGTSESATPESGPGSPAGSP | | TTCTACTAGCGAATCCCCGTCTGGTACTGCTCCAGGT | |
| | TSTEEGTSTEPSEGSAPGTS | | ACTTCTACTCCTGAAAGCGGTTCCGCTTCTCCAGGTA | |
| | ESATPESGPGTSTEPSEGSA | | CCTCTACTCCGGAAAGCGGTTCTGCATCTCCAGGTA | |
| | PGTSTEPSEGSAPGSPAGSP | | GCGAACCGGCAACCTCCGGCTCTGAAACCCCAGGTA | |
| | TSTEEGTSTEPSEGSAPGTS | | CCTCTGAAAGCGCTACTCCTGAATCCGGCCCAGGTA | |
| | TEPSEGSAPGTSESATPESG | | GCCCGGCAGGTTCTCCGACTTCCACTGAGGAAGGTA | |
| | PGTSESATPESGPGTSTEPS | | CCTCTACTGAACCTTCTGAGGGCAGCGCTCCAGGTA | |
| | EGSAPGTSTEPSEGSAPGT | | CTTCTGAAAGCGCTACCCCGGAGTCCGGTCCAGGTA | |
| | SESATPESGPGTSTEPSEGS | | CTTCTACTGAACCGTCCGAAGGTAGCGCACCAGGTA | |
| | APGSEPATSGSETPGSPAG | | CTTCTACCGAACCGTCCGAGGGTAGCGCACCAGGTA | |
| | SPTSTEEGSSTPSGATGSPG | | GCCCAGCAGGTTCTCCTACCTCCACCGAGGAAGGTA | |
| | TPGSGTASSSPGSSTPSGAT | | CTTCTACCGAACCGTCCGAGGGTAGCGCACCAGGTA | |
| | GSPGTSTEPSEGSAPGTSTE | | CTTCTACCGAACCTTCCGAGGGCAGCGCACCAGGTA | |
| | PSEGSAPGSEPATSGSETPG | | CTTCTGAAAGCGCTACCCCTGAGTCCGGCCCAGGTA | |
| | SPAGSPTSTEEGSPAGSPTS | | CTTCTGAAAGCGCTACTCCTGAATCCGGTCCAGGTA | |
| | TEEGTSTEPSEGSAPGPEPT | | CCTCTACTGAACCTTCCGAAGGCAGCGCTCCAGGTA | |
| | GPAPSGGSEPATSGSETPG | | CCTCTACCGAACCGTCCGAGGGCAGCGCACCAGGTA | |
| | TSESATPESGPGSPAGSPTS | | CTTCTGAAAGCGCAACCCCTGAATCCGGTCCAGGTA | |
| | TEEGTSESATPESGPGSPA | | CTTCTACTGAACCTTCCGAAGGTAGCGCTCCAGGTA | |
| | GSPTSTEEGSPAGSPTSTEE | | GCGAACCTGCTACTTCTGGTTCTGAAACCCCAGGTA | |
| | GTSESATPESGPGSPAGSPT | | GCCCGGCTGGCTCTCCGACCTCCACCGAGGAAGGTA | |
| | STEEGSPAGSPTSTEEGSTS | | GCTCTACCCCGTCTGGTGCTACTGGTTCTCCAGGTAC | |
| | STAESPGPGSTSESPSGTAP | | TCCGGGCAGCGGTACTGCTTCTTCCTCTCCAGGTAGC | |
| | GTSPSGESSTAPGSTSESPS | | TCTACCCCTTCTGGTGCTACTGGCTCTCCAGGTACCT | |
| | GTAPGSTSESPSGTAPGTSP | | CTACCGAACCGTCCGAGGGTAGCGCACCAGGTACCT | |
| | SGESSTAPGTSTEPSEGSAP | | CTACTGAACCGTCTGAGGGTAGCGCTCCAGGTAGCG | |
| | GTSESATPESGPGTSESATP | | AACCGGCAACCTCCGGTTCTGAAACTCCAGGTAGCC | |
| | ESGPGSEPATSGSETPGTSE | | CTGCTGGCTCTCCGACTTCTACTGAGGAAGGTAGCC | |
| | SATPESGPGTSESATPESGP | | CGGCTGGTTCTCCGACTTCTACTGAGGAAGGTACTTC | |
| | GTSTEPSEGSAPGTSESATP | | TACCGAACCTTCCGAAGGTAGCGCTCCAGGTCCAGA | |
| | ESGPGTSTEPSEGSAPGTSP | | ACCAACGGGGCCGGCCCCAAGCGGAGGTAGCGAAC | |
| | SGESSTAPGTSPSGESSTAP | | CGGCAACCTCCGGCTCTGAAACCCCAGGTACCTCTG | |
| | GTSPSGESSTAPGTSTEPSE | | AAAGCGCTACTCCTGAATCCGGCCCAGGTAGCCCGG | |
| | GSAPGSPAGSPTSTEEGTS | | CAGGTTCTCCGACTTCCACTGAGGAAGGTACTTCTG | |
| | TEPSEGSAPGSSPSASTGTG | | AAAGCGCTACTCCTGAGTCCGGCCCAGGTAGCCCGG | |
| | PGSSTPSGATGSPGSSTPSG | | CTGGCTCTCCGACTTCCACCGAGGAAGGTAGCCCGG | |
| | ATGSPGSSTPSGATGSPGS | | CTGGCTCTCCAACTTCTACTGAAGAAGGTACTTCTGA | |
| | STPSGATGSPGASPGTSST | | AAGCGCTACTCCTGAGTCCGGCCCAGGTAGCCCGGC | |
| | GSPGASASGAPSTGGTSPS | | TGGCTCTCCGACTTCCACCGAGGAAGGTAGCCCGGC | |
| | GESSTAPGSTSSTAESPGPG | | TGGCTCTCCAACTTCTACTGAAGAAGGTTCTACCAGC | |
| | TSPSGESSTAPGTSESATPE | | TCTACCGCTGAATCTCCTGGCCCAGGTTCTACTAGCG | |
| | SGPGTSTEPSEGSAPGTSTE | | AATCTCCGTCTGGCACCGCACCAGGTACTTCCCCTAG | |
| | PSEGSAPGSSPSASTGTGP | | CGGTGAATCTTCTACTGCACCAGGTTCTACCAGCGA | |
| | GSSTPSGATGSPGASPGTS | | ATCTCCTTCTGGCACCGCTCCAGGTTCTACTAGCGAA | |
| | STGSPGTSTPESGSASPGTS | | TCCCCGTCTGGTACCGCACCAGGTACTTCTCCTAGCG | |
| | PSGESSTAPGTSPSGESSTA | | GCGAATCTTCTACCGCACCAGGTACTTCTACCGAAC | |
| | PGTSESATPESGPGSEPATS | | CTTCCGAGGGCAGCGCACCAGGTACTTCTGAAAGCG | |
| | GSETPGTSTEPSEGSAPGST | | CTACCCCTGAGTCCGGCCCAGGTACTTCTGAAAGCG | |
| | SESPSGTAPGSTSESPSGTA | | CTACTCCTGAATCCGGTCCAGGTAGCGAACCGGCAA | |
| | PGTSTPESGSASPGSPAGSP | | CCTCTGGCTCTGAAACCCCAGGTACCTCTGAAAGCG | |
| | TSTEEGTSESATPESGPGTS | | CTACTCCGGAATCTGGTCCAGGTACTTCTGAAAGCG | |
| | TEPSEGSAPGSPAGSPTSTE | | CTACTCCGGAATCCGGTCCAGGTACCTCTACTGAAC | |
| | EGTSESATPESGPGSEPATS | | CTTCTGAGGGCAGCGCTCCAGGTACTTCTGAAAGCG | |
| | GSETPGSSTPSGATGSPGA | | CTACCCCGGAGTCCGGTCCAGGTACTTCTACTGAAC | |
| | SPGTSSTGSPGSSTPSGATG | | CGTCCGAAGGTAGCGCACCAGGTACCTCCCCTAGCG | |
| | SPGSTSESPSGTAPGTSPSG | | GCGAATCTTCTACTGCTCCAGGTACCTCTCCTAGCGG | |
| | ESSTAPGSTSSTAESPGPGS | | CGAATCTTCTACCGCTCCAGGTACCTCCCCTAGCGGT | |
| | STPSGATGSPGASPGTSST | | GAATCTTCTACCGCACCAGGTACTTCTACCGAACCGT | |
| | GSPGTPGSGTASSSPGSPA | | CCGAGGGTAGCGCACCAGGTAGCCCAGCAGGTTCTC | |
| | GSPTSTEEGSPAGSPTSTEE | | CTACCTCCACCGAGGAAGGTACTTCTACCGAACCGT | |
| | GTSTEPSEGSAPGFPTIPLS | | CCGAGGGTAGCGCACCAGGTTCTAGCCCTTCTGCTTC | |
| | RLFDNAMLRAHRLHQLAF | | CACCGGTACCGGCCCAGGTAGCTCTACTCCGTCTGG | |
| | DTYQEFEEAYIPKEQKYSF | | TGCAACTGGCTCTCCAGGTAGCTCTACTCCGTCTGGT | |
| | LQNPQTSLCFSESIPTPSNR | | GCAACCGGCTCCCCAGGTAGCTCTACCCCGTCTGGT | |
| | EETQQKSNLELLRISLLLIQ | | GCTACCGGCTCTCCAGGTAGCTCTACCCCGTCTGGTG | |
| | SWLEPVQFLRSVFANSLV | | CAACCGGCTCCCCAGGTGCATCCCCGGGTACTAGCT | |
| | YGASDSNVYDLLKDLEEG | | CTACCGGTTCTCCAGGTGCAAGCGCAAGCGGCGCGC | |
| | IQTLMGRLEDGSPRTGQIF | | CAAGCACGGGAGGTACTTCTCCGAGCGGTGAATCTT | |
| | KQTYSKFDTNSHNDDALL | | CTACCGCACCAGGTTCTACTAGCTCTACCGCTGAATC | |
| | KNYGLLYCFRKDMDKVE | | TCCGGGCCCAGGTACTTCTCCGAGCGGTGAATCTTCT | |
| | TFLRIVQCRSVEGSCGF | | ACTGCTCCAGGTACCTCTGAAAGCGCTACTCCGGAG | |
| | | | TCTGGCCCAGGTACCTCTACTGAACCGTCTGAGGGT | |
| | | | AGCGCTCCAGGTACTTCTACTGAACCGTCCGAAGGT | |
| | | | AGCGCACCAGGTTCTAGCCCTTCTGCATCTACTGGTA | |
| | | | CTGGCCCAGGTAGCTCTACTCCTTCTGGTGCTACCGG | |
| | | | CTCTCCAGGTGCTTCTCCGGGTACTAGCTCTACCGGT | |
| | | | TCTCCAGGTACTTCTACTCCGGAAAGCGGTTCCGCAT | |
| | | | CTCCAGGTACTTCTCCTAGCGGTGAATCTTCTACTGC | |
| | | | TCCAGGTACCTCTCCTAGCGGCGAATCTTCTACTGCT | |
| | | | CCAGGTACTTCTGAAAGCGCAACCCCTGAATCCGGT | |
| | | | CCAGGTAGCGAACCGGCTACTTCTGGCTCTGAGACT | |
| | | | CCAGGTACTTCTACCGAACCGTCCGAAGGTAGCGCA | |
| | | | CCAGGTTCTACCAGCGAATCCCCTTCTGGTACTGCTC | |
| | | | CAGGTTCTACCAGCGAATCCCCTTCTGGCACCGCAC | |
| | | | CAGGTACTTCTACCCCTGAAAGCGGCTCCGCTTCTCC | |
| | | | AGGTAGCCCGGCAGGCTCTCCGACCTCTACTGAGGA | |
| | | | AGGTACTTCTGAAAGCGCAACCCCGGAGTCCGGCCC | |
| | | | AGGTACCTCTACCGAACCGTCTGAGGGCAGCGCACC | |
| | | | AGGTAGCCCTGCTGGCTCTCCAACCTCCACCGAAGA | |
| | | | AGGTACCTCTGAAAGCGCAACCCCTGAATCCGGCCC | |
| | | | AGGTAGCGAACCGGCAACCTCCGGTTCTGAAACCCC | |
| | | | AGGTAGCTCTACCCCGTCTGGTGCTACCGGTTCCCCA | |
| | | | GGTGCTTCTCCTGGTACTAGCTCTACCGGTTCTCCAG | |
| | | | GTAGCTCTACCCCGTCTGGTGCTACTGGCTCTCCAGG | |
| | | | TTCTACTAGCGAATCCCCGTCTGGTACTGCTCCAGGT | |
| | | | ACTTCCCCTAGCGGTGAATCTTCTACTGCTCCAGGTT | |
| | | | CTACCAGCTCTACCGCAGAATCTCCGGGTCCAGGTA | |
| | | | GCTCTACCCCTTCTGGTGCAACCGGCTCTCCAGGTGC | |
| | | | ATCCCCGGGTACCAGCTCTACCGGTTCTCCAGGTACT | |
| | | | CCGGGTAGCGGTACCGCTTCTTCCTCTCCAGGTAGCC | |
| | | | CTGCTGGCTCTCCGACTTCTACTGAGGAAGGTAGCC | |
| | | | CGGCTGGTTCTCCGACTTCTACTGAGGAAGGTACTTC | |
| | | | TACCGAACCTTCCGAAGGTAGCGCTCCAGGTTTTCC | |
| | | | GACTATTCCGCTGTCTCGTCTGTTTGATAATGCTATG | |
| | | | CTGCGTGCGCACCGTCTGCACCAGCTGGCCTTTGATA | |
| | | | CTTACCAGGAATTTGAAGAAGCcTACATTCCTAAAG | |
| | | | AGCAGAAGTACTCTTTCCTGCAAAACCCACAGACTT | |
| | | | CTCTCTGCTTCAGCGAATCTATTCCGACGCCTTCCAA | |
| | | | TCGCGAGGAAACTCAGCAAAAGTCCAATCTGGAACT | |
| | | | ACTCCGCATTTCTCTGCTTCTGATTCAGAGCTGGCTA | |
| | | | GAACCAGTGCAATTTCTGCGTTCCGTCTTCGCCAATA | |
| | | | GCCTAGTTTATGGCGCATCCGACAGCAACGTATACG | |
| | | | ATCTCCTGAAAGATCTCGAGGAAGGCATTCAGACCC | |
| | | | TGATGGGTCGTCTCGAGGATGGCTCTCCGCGTACTG | |
| | | | GTCAGATCTTCAAGCAGACTTACTCTAAATTTGATAC | |
| | | | TAACAGCCACAATGACGATGCGCTTCTAAAAAACTA | |
| | | | TGGTCTGCTGTATTGTTTTCGTAAAGATATGGACAAA | |
| | | | GTTGAAACCTTCCTGCGTATTGTTCAGTGTCGTTCCG | |
| | | | TTGAGGGCAGCTGTGGTTTCTAA | |
| hGH- | FPTIPLSRLFDNAMLRAHR | 703 | TTTCCGACTATTCCGCTGTCTCGTCTGTTTGATAATG | 704 |
| AE144 | LHQLAFDTYQEFEEAYIPK | | CTATGCTGCGTGCGCACCGTCTGCACCAGCTGGCCTT | |
| | EQKYSFLQNPQTSLCFSESI | | TGATACTTACCAGGAATTTGAAGAAGCcTACATTCCT | |
| | PTPSNREETQQKSNLELLRI | | AAAGAGCAGAAGTACTCTTTCCTGCAAAACCCACAG | |
| | SLLLIQSWLEPVQFLRSVF | | ACTTCTCTCTGCTTCAGCGAATCTATTCCGACGCCTT | |
| | ANSLVYGASDSNVYDLLK | | CCAATCGCGAGGAAACTCAGCAAAAGTCCAATCTGG | |
| | DLEEGIQTLMGRLEDGSPR | | AACTACTCCGCATTTCTCTGCTTCTGATTCAGAGCTG | |
| | TGQIFKQTYSKFDTNSHND | | GCTAGAACCAGTGCAATTTCTGCGTTCCGTCTTCGCC | |
| | DALLKNYGLLYCFRKDM | | AATAGCCTAGTTTATGGCGCATCCGACAGCAACGTA | |
| | DKVETFLRIVQCRSVEGSC | | TACGATCTCCTGAAAGATCTCGAGGAAGGCATTCAG | |
| | GFGGSEPATSGSETPGTSE | | ACCCTGATGGGTCGTCTCGAGGATGGCTCTCCGCGT | |
| | SATPESGPGSEPATSGSETP | | ACTGGTCAGATCTTCAAGCAGACTTACTCTAAATTTG | |
| | GSPAGSPTSTEEGTSTEPSE | | ATACTAACAGCCACAATGACGATGCGCTTCTAAAAA | |
| | GSAPGSEPATSGSETPGSEP | | ACTATGGTCTGCTGTATTGTTTTCGTAAAGATATGGA | |
| | ATSGSETPGSEPATSGSETP | | CAAAGTTGAAACCTTCCTGCGTATTGTTCAGTGTCGT | |
| | GTSTEPSEGSAPGTSESATP | | TCCGTTGAGGGCAGCTGTGGTTTCTAAGGTGGTAGC | |
| | ESGPGSEPATSGSETPGTST | | GAACCGGCAACTTCCGGCTCTGAAACCCCAGGTACT | |
| | EPSEGSAP | | TCTGAAAGCGCTACTCCTGAGTCTGGCCCAGGTAGC | |
| | | | GAACCTGCTACCTCTGGCTCTGAAACCCCAGGTAGC | |
| | | | CCGGCAGGCTCTCCGACTTCCACCGAGGAAGGTACC | |
| | | | TCTACTGAACCTTCTGAGGGTAGCGCTCCAGGTAGC | |
| | | | GAACCGGCAACCTCTGGCTCTGAAACCCCAGGTAGC | |
| | | | GAACCTGCTACCTCCGGCTCTGAAACTCCAGGTAGC | |
| | | | GAACCGGCTACTTCCGGTTCTGAAACTCCAGGTACC | |
| | | | TCTACCGAACCTTCCGAAGGCAGCGCACCAGGTACT | |
| | | | TCTGAAAGCGCAACCCCTGAATCCGGTCCAGGTAGC | |
| | | | GAACCGGCTACTTCTGGCTCTGAGACTCCAGGTACTT | |
| | | | CTACCGAACCGTCCGAAGGTAGCGCACCA | |
| hGH- | FPTIPLSRLFDNAMLRAHR | 705 | TTTCCGACTATTCCGCTGTCTCGTCTGTTTGATAATG | 706 |
| AE288 | LHQLAFDTYQEFEEAYIPK | | CTATGCTGCGTGCGCACCGTCTGCACCAGCTGGCCTT | |
| | EQKYSFLQNPQTSLCFSESI | | TGATACTTACCAGGAATTTGAAGAAGCcTACATTCCT | |
| | PTPSNREETQQKSNLELLRI | | AAAGAGCAGAAGTACTCTTTCCTGCAAAACCCACAG | |
| | SLLLIQSWLEPVQFLRSVF | | ACTTCTCTCTGCTTCAGCGAATCTATTCCGACGCCTT | |
| | ANSLVYGASDSNVYDLLK | | CCAATCGCGAGGAAACTCAGCAAAAGTCCAATCTGG | |
| | DLEEGIQTLMGRLEDGSPR | | AACTACTCCGCATTTCTCTGCTTCTGATTCAGAGCTG | |
| | TGQIFKQTYSKFDTNSHND | | GCTAGAACCAGTGCAATTTCTGCGTTCCGTCTTCGCC | |
| | DALLKNYGLLYCFRKDM | | AATAGCCTAGTTTATGGCGCATCCGACAGCAACGTA | |
| | DKVETFLRIVQCRSVEGSC | | TACGATCTCCTGAAAGATCTCGAGGAAGGCATTCAG | |
| | GFGGTSESATPESGPGSEP | | ACCCTGATGGGTCGTCTCGAGGATGGCTCTCCGCGT | |
| | ATSGSETPGTSESATPESGP | | ACTGGTCAGATCTTCAAGCAGACTTACTCTAAATTTG | |
| | GSEPATSGSETPGTSESATP | | ATACTAACAGCCACAATGACGATGCGCTTCTAAAAA | |
| | ESGPGTSTEPSEGSAPGSPA | | ACTATGGTCTGCTGTATTGTTTTCGTAAAGATATGGA | |
| | GSPTSTEEGTSESATPESGP | | CAAAGTTGAAACCTTCCTGCGTATTGTTCAGTGTCGT | |
| | GSEPATSGSETPGTSESATP | | TCCGTTGAGGGCAGCTGTGGTTTCTAAGGTGGTACCT | |
| | ESGPGSPAGSPTSTEEGSPA | | CTGAAAGCGCAACTCCTGAGTCTGGCCCAGGTAGCG | |
| | GSPTSTEEGTSTEPSEGSAP | | AACCTGCTACCTCCGGCTCTGAGACTCCAGGTACCTC | |
| | GTSESATPESGPGTSESATP | | TGAAAGCGCAACCCCGGAATCTGGTCCAGGTAGCGA | |
| | ESGPGTSESATPESGPGSEP | | ACCTGCAACCTCTGGCTCTGAAACCCCAGGTACCTCT | |
| | ATSGSETPGSEPATSGSETP | | GAAAGCGCTACTCCTGAATCTGGCCCAGGTACTTCT | |
| | GSPAGSPTSTEEGTSTEPSE | | ACTGAACCGTCCGAGGGCAGCGCACCAGGTAGCCCT | |
| | GSAPGTSTEPSEGSAPGSEP | | GCTGGCTCTCCAACCTCCACCGAAGAAGGTACCTCT | |
| | ATSGSETPGTSESATPESGP | | GAAAGCGCAACCCCTGAATCCGGCCCAGGTAGCGAA | |
| | GTSTEPSEGSAP | | CCGGCAACCTCCGGTTCTGAAACCCCAGGTACTTCT | |
| | | | GAAAGCGCTACTCCTGAGTCCGGCCCAGGTAGCCCG | |
| | | | GCTGGCTCTCCGACTTCCACCGAGGAAGGTAGCCCG | |
| | | | GCTGGCTCTCCAACTTCTACTGAAGAAGGTACTTCTA | |
| | | | CCGAACCTTCCGAGGGCAGCGCACCAGGTACTTCTG | |
| | | | AAAGCGCTACCCCTGAGTCCGGCCCAGGTACTTCTG | |
| | | | AAAGCGCTACTCCTGAATCCGGTCCAGGTACTTCTG | |
| | | | AAAGCGCTACCCCGGAATCTGGCCCAGGTAGCGAAC | |
| | | | CGGCTACTTCTGGTTCTGAAACCCCAGGTAGCGAAC | |
| | | | CGGCTACCTCCGGTTCTGAAACTCCAGGTAGCCCAG | |
| | | | CAGGCTCTCCGACTTCCACTGAGGAAGGTACTTCTA | |
| | | | CTGAACCTTCCGAAGGCAGCGCACCAGGTACCTCTA | |
| | | | CTGAACCTTCTGAGGGCAGCGCTCCAGGTAGCGAAC | |
| | | | CTGCAACCTCTGGCTCTGAAACCCCAGGTACCTCTG | |
| | | | AAAGCGCTACTCCTGAATCTGGCCCAGGTACTTCTA | |
| | | | CTGAACCGTCCGAGGGCAGCGCACCA | |
| hGH- | FPTIPLSRLFDNAMLRAHR | 707 | TTTCCGACTATTCCGCTGTCTCGTCTGTTTGATAATG | 708 |
| AF144 | LHQLAFDTYQEFEEAYIPK | | CTATGCTGCGTGCGCACCGTCTGCACCAGCTGGCCTT | |
| | EQKYSFLQNPQTSLCFSESI | | TGATACTTACCAGGAATTTGAAGAAGCcTACATTCCT | |
| | PTPSNREETQQKSNLELLRI | | AAAGAGCAGAAGTACTCTTTCCTGCAAAACCCACAG | |
| | SLLLIQSWLEPVQFLRSVF | | ACTTCTCTCTGCTTCAGCGAATCTATTCCGACGCCTT | |
| | ANSLVYGASDSNVYDLLK | | CCAATCGCGAGGAAACTCAGCAAAAGTCCAATCTGG | |
| | DLEEGIQTLMGRLEDGSPR | | AACTACTCCGCATTTCTCTGCTTCTGATTCAGAGCTG | |
| | TGQIFKQTYSKFDTNSHND | | GCTAGAACCAGTGCAATTTCTGCGTTCCGTCTTCGCC | |
| | DALLKNYGLLYCFRKDM | | AATAGCCTAGTTTATGGCGCATCCGACAGCAACGTA | |
| | DKVETFLRIVQCRSVEGSC | | TACGATCTCCTGAAAGATCTCGAGGAAGGCATTCAG | |
| | GFGGTSTPESGSASPGTSPS | | ACCCTGATGGGTCGTCTCGAGGATGGCTCTCCGCGT | |
| | GESSTAPGTSPSGESSTAPG | | ACTGGTCAGATCTTCAAGCAGACTTACTCTAAATTTG | |
| | STSSTAESPGPGSTSESPSG | | ATACTAACAGCCACAATGACGATGCGCTTCTAAAAA | |
| | TAPGSTSSTAESPGPGTSPS | | ACTATGGTCTGCTGTATTGTTTTCGTAAAGATATGGA | |
| | GESSTAPGTSTPESGSASPG | | CAAAGTTGAAACCTTCCTGCGTATTGTTCAGTGTCGT | |
| | STSSTAESPGPGTSPSGESS | | TCCGTTGAGGGCAGCTGTGGTTTCTAAGGTGGTACTT | |
| | TAPGTSPSGESSTAPGTSPS | | CTACTCCGGAAAGCGGTTCCGCATCTCCAGGTACTTC | |
| | GESSTAP | | TCCTAGCGGTGAATCTTCTACTGCTCCAGGTACCTCT | |
| | | | CCTAGCGGCGAATCTTCTACTGCTCCAGGTTCTACCA | |
| | | | GCTCTACCGCTGAATCTCCTGGCCCAGGTTCTACCAG | |
| | | | CGAATCCCCGTCTGGCACCGCACCAGGTTCTACTAG | |
| | | | CTCTACCGCAGAATCTCCGGGTCCAGGTACTTCCCCT | |
| | | | AGCGGTGAATCTTCTACTGCTCCAGGTACCTCTACTC | |
| | | | CGGAAAGCGGCTCCGCATCTCCAGGTTCTACTAGCT | |
| | | | CTACTGCTGAATCTCCTGGTCCAGGTACCTCCCCTAG | |
| | | | CGGCGAATCTTCTACTGCTCCAGGTACCTCTCCTAGC | |
| | | | GGCGAATCTTCTACCGCTCCAGGTACCTCCCCTAGCG | |
| | | | GTGAATCTTCTACCGCACCA | |
| hGH- | FPTIPLSRLFDNAMLRAHR | 709 | TTTCCGACTATTCCGCTGTCTCGTCTGTTTGATAATG | 710 |
| AD576 | LHQLAFDTYQEFEEAYIPK | | CTATGCTGCGTGCGCACCGTCTGCACCAGCTGGCCTT | |
| | EQKYSFLQNPQTSLCFSESI | | TGATACTTACCAGGAATTTGAAGAAGCcTACATTCCT | |
| | PTPSNREETQQKSNLELLRI | | AAAGAGCAGAAGTACTCTTTCCTGCAAAACCCACAG | |
| | SLLLIQSWLEPVQFLRSVF | | ACTTCTCTCTGCTTCAGCGAATCTATTCCGACGCCTT | |
| | ANSLVYGASDSNVYDLLK | | CCAATCGCGAGGAAACTCAGCAAAAGTCCAATCTGG | |
| | DLEEGIQTLMGRLEDGSPR | | AACTACTCCGCATTTCTCTGCTTCTGATTCAGAGCTG | |
| | TGQIFKQTYSKFDTNSHND | | GCTAGAACCAGTGCAATTTCTGCGTTCCGTCTTCGCC | |
| | DALLKNYGLLYCFRKDM | | AATAGCCTAGTTTATGGCGCATCCGACAGCAACGTA | |
| | DKVETFLRIVQCRSVEGSC | | TACGATCTCCTGAAAGATCTCGAGGAAGGCATTCAG | |
| | GFGGSSESGSSEGGPGSGG | | ACCCTGATGGGTCGTCTCGAGGATGGCTCTCCGCGT | |
| | EPSESGSSGSSESGSSEGGP | | ACTGGTCAGATCTTCAAGCAGACTTACTCTAAATTTG | |
| | GSSESGSSEGGPGSSESGSS | | ATACTAACAGCCACAATGACGATGCGCTTCTAAAAA | |
| | EGGPGSSESGSSEGGPGSS | | ACTATGGTCTGCTGTATTGTTTTCGTAAAGATATGGA | |
| | ESGSSEGGPGESPGGSSGS | | CAAAGTTGAAACCTTCCTGCGTATTGTTCAGTGTCGT | |
| | ESGSEGSSGPGESSGSSESG | | TCCGTTGAGGGCAGCTGTGGTTTCTAAGGTGGTTCCT | |
| | SSEGGPGSSESGSSEGGPG | | CTGAAAGCGGTTCTTCCGAAGGTGGTCCAGGTTCCT | |
| | SSESGSSEGGPGSGGEPSES | | CTGAAAGCGGTTCTTCTGAGGGTGGTCCAGGTGAAT | |
| | GSSGESPGGSSGSESGESP | | CTCCGGGTGGCTCCAGCGGTTCCGAGTCAGGTTCTG | |
| | GGSSGSESGSGGEPSESGS | | GTGGCGAACCTTCCGAGTCTGGTAGCTCAGGTGAAT | |
| | SGSSESGSSEGGPGSGGEP | | CTCCGGGTGGTTCTAGCGGTTCCGAGTCAGGTGAAT | |
| | SESGSSGSGGEPSESGSSGS | | CTCCGGGTGGTTCCAGCGGTTCTGAGTCAGGTTCCTC | |
| | EGSSGPGESSGESPGGSSG | | CGAAAGCGGTTCTTCTGAGGGCGGTCCAGGTTCCTC | |
| | SESGSGGEPSESGSSGSGG | | CGAAAGCGGTTCTTCCGAGGGCGGTCCAGGTTCTTC | |
| | EPSESGSSGSGGEPSESGSS | | TGAAAGCGGTTCTTCCGAGGGCGGTCCAGGTGAATC | |
| | GSSESGSSEGGPGESPGGS | | TCCTGGTGGTTCCAGCGGTTCCGAGTCAGGTGAATCT | |
| | SGSESGESPGGSSGSESGES | | CCAGGTGGCTCTAGCGGTTCCGAGTCAGGTGAATCT | |
| | PGGSSGSESGESPGGSSGS | | CCTGGTGGTTCTAGCGGTTCTGAATCAGGTTCCTCCG | |
| | ESGESPGGSSGSESGSSESG | | AAAGCGGTTCTTCTGAGGGCGGTCCAGGTTCCTCCG | |
| | SSEGGPGSGGEPSESGSSG | | AAAGCGGTTCTTCCGAGGGCGGTCCAGGTTCTTCTG | |
| | SEGSSGPGESSGSSESGSSE | | AAAGCGGTTCTTCCGAGGGCGGTCCAGGTTCCTCTG | |
| | GGPGSGGEPSESGSSGSSE | | AAAGCGGTTCTTCTGAGGGCGGTCCAGGTTCTTCCG | |
| | SGSSEGGPGSGGEPSESGS | | AAAGCGGTTCTTCCGAGGGCGGTCCAGGTTCTTCCG | |
| | SGESPGGSSGSESGESPGG | | AAAGCGGTTCTTCTGAAGGCGGTCCAGGTTCTGGTG | |
| | SSGSESGSSESGSSEGGPGS | | GCGAACCGTCCGAGTCTGGTAGCTCAGGTGAATCTC | |
| | GGEPSESGSSGSSESGSSEG | | CGGGTGGCTCTAGCGGTTCCGAGTCAGGTGAATCTC | |
| | GPGSGGEPSESGSSGSGGE | | CTGGTGGTTCCAGCGGTTCCGAGTCAGGTTCCGGTG | |
| | PSESGSSGESPGGSSGSESG | | GCGAACCGTCCGAATCTGGTAGCTCAGGTAGCGAAG | |
| | SEGSSGPGESSGSSESGSSE | | GTTCTTCTGGTCCAGGCGAATCTTCAGGTTCCTCTGA | |
| | GGPGSEGSSGPGESS | | AAGCGGTTCTTCTGAGGGCGGTCCAGGTTCCGGTGG | |
| | | | CGAACCGTCCGAATCTGGTAGCTCAGGTAGCGAAGG | |
| | | | TTCTTCTGGTCCAGGCGAATCTTCAGGTTCCTCTGAA | |
| | | | AGCGGTTCTTCTGAGGGCGGTCCAGGTTCCGGTGGC | |
| | | | GAACCTTCCGAATCTGGTAGCTCAGGTGAATCTCCG | |
| | | | GGTGGTTCTAGCGGTTCTGAGTCAGGTTCTGGTGGTG | |
| | | | AACCTTCCGAGTCTGGTAGCTCAGGTTCTGGTGGCG | |
| | | | AACCATCCGAGTCTGGTAGCTCAGGTTCTTCCGAAA | |
| | | | GCGGTTCTTCCGAAGGCGGTCCAGGTTCTGGTGGTG | |
| | | | AACCGTCCGAATCTGGTAGCTCAGGTTCTGGTGGCG | |
| | | | AACCATCCGAATCTGGTAGCTCAGGTAGCGAAGGTT | |
| | | | CTTCTGGTCCTGGCGAATCTTCAGGTGAATCTCCAGG | |
| | | | TGGCTCTAGCGGTTCCGAATCAGGTAGCGAAGGTTC | |
| | | | TTCCGGTCCAGGTGAATCTTCAGGTAGCGAAGGTTC | |
| | | | TTCTGGTCCTGGTGAATCCTCAGGTTCCGGTGGCGAA | |
| | | | CCATCTGAATCTGGTAGCTCAGGTTCCTCTGAAAGC | |
| | | | GGTTCTTCCGAAGGTGGTCCAGGTTCCTCTGAAAGC | |
| | | | GGTTCTTCTGAGGGTGGTCCAGGTGAATCTCCGGGT | |
| | | | GGCTCCAGCGGTTCCGAGTCAGGTTCTGGTGGCGAA | |
| | | | CCATCCGAATCTGGTAGCTCAGGTAGCGAAGGTTCT | |
| | | | TCTGGTCCTGGCGAATCTTCAGGTGAATCTCCAGGTG | |
| | | | GCTCTAGCGGTTCCGAATCAGGTAGCGAAGGTTCTT | |
| | | | CCGGTCCTGGTGAGTCTTCAGGTGAATCTCCAGGTG | |
| | | | GCTCTAGCGGTTCCGAGTCAGGTAGCGAAGGTTCTT | |
| | | | CTGGTCCTGGCGAGTCCTCA | |
| hGH- | FPTIPLSRLFDNAMLRAHR | 711 | TTTCCGACTATTCCGCTGTCTCGTCTGTTTGATAATG | 712 |
| AE576 | LHQLAFDTYQEFEEAYIPK | | CTATGCTGCGTGCGCACCGTCTGCACCAGCTGGCCTT | |
| | EQKYSFLQNPQTSLCFSESI | | TGATACTTACCAGGAATTTGAAGAAGCcTACATTCCT | |
| | PTPSNREETQQKSNLELLRI | | AAAGAGCAGAAGTACTCTTTCCTGCAAAACCCACAG | |
| | SLLLIQSWLEPVQFLRSVF | | ACTTCTCTCTGCTTCAGCGAATCTATTCCGACGCCTT | |
| | ANSLVYGASDSNVYDLLK | | CCAATCGCGAGGAAACTCAGCAAAAGTCCAATCTGG | |
| | DLEEGIQTLMGRLEDGSPR | | AACTACTCCGCATTTCTCTGCTTCTGATTCAGAGCTG | |
| | TGQIFKQTYSKFDTNSHND | | GCTAGAACCAGTGCAATTTCTGCGTTCCGTCTTCGCC | |
| | DALLKNYGLLYCFRKDM | | AATAGCCTAGTTTATGGCGCATCCGACAGCAACGTA | |
| | DKVETFLRIVQCRSVEGSC | | TACGATCTCCTGAAAGATCTCGAGGAAGGCATTCAG | |
| | GFGGSPAGSPTSTEEGTSE | | ACCCTGATGGGTCGTCTCGAGGATGGCTCTCCGCGT | |
| | SATPESGPGTSTEPSEGSAP | | ACTGGTCAGATCTTCAAGCAGACTTACTCTAAATTTG | |
| | GSPAGSPTSTEEGTSTEPSE | | ATACTAACAGCCACAATGACGATGCGCTTCTAAAAA | |
| | GSAPGTSTEPSEGSAPGTS | | ACTATGGTCTGCTGTATTGTTTTCGTAAAGATATGGA | |
| | ESATPESGPGSEPATSGSET | | CAAAGTTGAAACCTTCCTGCGTATTGTTCAGTGTCGT | |
| | PGSEPATSGSETPGSPAGSP | | TCCGTTGAGGGCAGCTGTGGTTTCTAAGGTGGTAGC | |
| | TSTEEGTSESATPESGPGTS | | CCGGCTGGCTCTCCTACCTCTACTGAGGAAGGTACTT | |
| | TEPSEGSAPGTSTEPSEGSA | | CTGAAAGCGCTACTCCTGAGTCTGGTCCAGGTACCT | |
| | PGSPAGSPTSTEEGTSTEPS | | CTACTGAACCGTCCGAAGGTAGCGCTCCAGGTAGCC | |
| | EGSAPGTSTEPSEGSAPGT | | CAGCAGGCTCTCCGACTTCCACTGAGGAAGGTACTT | |
| | SESATPESGPGTSTEPSEGS | | CTACTGAACCTTCCGAAGGCAGCGCACCAGGTACCT | |
| | APGTSESATPESGPGSEPA | | CTACTGAACCTTCTGAGGGCAGCGCTCCAGGTACTT | |
| | TSGSETPGTSTEPSEGSAPG | | CTGAAAGCGCTACCCCGGAATCTGGCCCAGGTAGCG | |
| | TSTEPSEGSAPGTSESATPE | | AACCGGCTACTTCTGGTTCTGAAACCCCAGGTAGCG | |
| | SGPGTSESATPESGPGSPA | | AACCGGCTACCTCCGGTTCTGAAACTCCAGGTAGCC | |
| | GSPTSTEEGTSESATPESGP | | CGGCAGGCTCTCCGACCTCTACTGAGGAAGGTACTT | |
| | GSEPATSGSETPGTSESATP | | CTGAAAGCGCAACCCCGGAGTCCGGCCCAGGTACCT | |
| | ESGPGTSTEPSEGSAPGTST | | CTACCGAACCGTCTGAGGGCAGCGCACCAGGTACTT | |
| | EPSEGSAPGTSTEPSEGSAP | | CTACCGAACCGTCCGAGGGTAGCGCACCAGGTAGCC | |
| | GTSTEPSEGSAPGTSTEPSE | | CAGCAGGTTCTCCTACCTCCACCGAGGAAGGTACTT | |
| | GSAPGTSTEPSEGSAPGSP | | CTACCGAACCGTCCGAGGGTAGCGCACCAGGTACCT | |
| | AGSPTSTEEGTSTEPSEGSA | | CTACTGAACCTTCTGAGGGCAGCGCTCCAGGTACTT | |
| | PGTSESATPESGPGSEPATS | | CTGAAAGCGCTACCCCGGAGTCCGGTCCAGGTACTT | |
| | GSETPGTSESATPESGPGSE | | CTACTGAACCGTCCGAAGGTAGCGCACCAGGTACTT | |
| | PATSGSETPGTSESATPESG | | CTGAAAGCGCAACCCCTGAATCCGGTCCAGGTAGCG | |
| | PGTSTEPSEGSAPGTSESAT | | AACCGGCTACTTCTGGCTCTGAGACTCCAGGTACTTC | |
| | PESGPGSPAGSPTSTEEGSP | | TACCGAACCGTCCGAAGGTAGCGCACCAGGTACTTC | |
| | AGSPTSTEEGSPAGSPTSTE | | TACTGAACCGTCTGAAGGTAGCGCACCAGGTACTTC | |
| | EGTSESATPESGPGTSTEPS | | TGAAAGCGCAACCCCGGAATCCGGCCCAGGTACCTC | |
| | EGSAP | | TGAAAGCGCAACCCCGGAGTCCGGCCCAGGTAGCCC | |
| | | | TGCTGGCTCTCCAACCTCCACCGAAGAAGGTACCTC | |
| | | | TGAAAGCGCAACCCCTGAATCCGGCCCAGGTAGCGA | |
| | | | ACCGGCAACCTCCGGTTCTGAAACCCCAGGTACCTC | |
| | | | TGAAAGCGCTACTCCGGAGTCTGGCCCAGGTACCTC | |
| | | | TACTGAACCGTCTGAGGGTAGCGCTCCAGGTACTTC | |
| | | | TACTGAACCGTCCGAAGGTAGCGCACCAGGTACTTC | |
| | | | TACCGAACCGTCCGAAGGCAGCGCTCCAGGTACCTC | |
| | | | TACTGAACCTTCCGAGGGCAGCGCTCCAGGTACCTC | |
| | | | TACCGAACCTTCTGAAGGTAGCGCACCAGGTACTTC | |
| | | | TACCGAACCGTCCGAGGGTAGCGCACCAGGTAGCCC | |
| | | | AGCAGGTTCTCCTACCTCCACCGAGGAAGGTACTTC | |
| | | | TACCGAACCGTCCGAGGGTAGCGCACCAGGTACCTC | |
| | | | TGAAAGCGCAACTCCTGAGTCTGGCCCAGGTAGCGA | |
| | | | ACCTGCTACCTCCGGCTCTGAGACTCCAGGTACCTCT | |
| | | | GAAAGCGCAACCCCGGAATCTGGTCCAGGTAGCGAA | |
| | | | CCTGCAACCTCTGGCTCTGAAACCCCAGGTACCTCTG | |
| | | | AAAGCGCTACTCCTGAATCTGGCCCAGGTACTTCTA | |
| | | | CTGAACCGTCCGAGGGCAGCGCACCAGGTACTTCTG | |
| | | | AAAGCGCTACTCCTGAGTCCGGCCCAGGTAGCCCGG | |
| | | | CTGGCTCTCCGACTTCCACCGAGGAAGGTAGCCCGG | |
| | | | CTGGCTCTCCAACTTCTACTGAAGAAGGTAGCCCGG | |
| | | | CAGGCTCTCCGACCTCTACTGAGGAAGGTACTTCTG | |
| | | | AAAGCGCAACCCCGGAGTCCGGCCCAGGTACCTCTA | |
| | | | CCGAACCGTCTGAGGGCAGCGCACCA | |
| hGH- | FPTIPLSRLFDNAMLRAHR | 713 | TTTCCGACTATTCCGCTGTCTCGTCTGTTTGATAATG | 714 |
| AF576 | LHQLAFDTYQEFEEAYIPK | | CTATGCTGCGTGCGCACCGTCTGCACCAGCTGGCCTT | |
| | EQKYSFLQNPQTSLCFSESI | | TGATACTTACCAGGAATTTGAAGAAGCcTACATTCCT | |
| | PTPSNREETQQKSNLELLRI | | AAAGAGCAGAAGTACTCTTTCCTGCAAAACCCACAG | |
| | SLLLIQSWLEPVQFLRSVF | | ACTTCTCTCTGCTTCAGCGAATCTATTCCGACGCCTT | |
| | ANSLVYGASDSNVYDLLK | | CCAATCGCGAGGAAACTCAGCAAAAGTCCAATCTGG | |
| | DLEEGIQTLMGRLEDGSPR | | AACTACTCCGCATTTCTCTGCTTCTGATTCAGAGCTG | |
| | TGQIFKQTYSKFDTNSHND | | GCTAGAACCAGTGCAATTTCTGCGTTCCGTCTTCGCC | |
| | DALLKNYGLLYCFRKDM | | AATAGCCTAGTTTATGGCGCATCCGACAGCAACGTA | |
| | DKVETFLRIVQCRSVEGSC | | TACGATCTCCTGAAAGATCTCGAGGAAGGCATTCAG | |
| | GFGGSTSSTAESPGPGSTSS | | ACCCTGATGGGTCGTCTCGAGGATGGCTCTCCGCGT | |
| | TAESPGPGSTSESPSGTAPG | | ACTGGTCAGATCTTCAAGCAGACTTACTCTAAATTTG | |
| | STSSTAESPGPGSTSSTAES | | ATACTAACAGCCACAATGACGATGCGCTTCTAAAAA | |
| | PGPGTSTPESGSASPGSTSE | | ACTATGGTCTGCTGTATTGTTTTCGTAAAGATATGGA | |
| | SPSGTAPGTSPSGESSTAPG | | CAAAGTTGAAACCTTCCTGCGTATTGTTCAGTGTCGT | |
| | STSESPSGTAPGSTSESPSG | | TCCGTTGAGGGCAGCTGTGGTTTCTAAGGTGGTTCTA | |
| | TAPGTSPSGESSTAPGSTSE | | CTAGCTCTACCGCTGAATCTCCTGGCCCAGGTTCCAC | |
| | SPSGTAPGSTSESPSGTAPG | | TAGCTCTACCGCAGAATCTCCGGGCCCAGGTTCTACT | |
| | TSPSGESSTAPGSTSESPSG | | AGCGAATCCCCTTCTGGTACCGCTCCAGGTTCTACTA | |
| | TAPGSTSESPSGTAPGSTSE | | GCTCTACCGCTGAATCTCCGGGTCCAGGTTCTACCAG | |
| | SPSGTAPGTSTPESGSASPG | | CTCTACTGCAGAATCTCCTGGCCCAGGTACTTCTACT | |
| | STSESPSGTAPGTSTPESGS | | CCGGAAAGCGGTTCCGCTTCTCCAGGTTCTACCAGC | |
| | ASPGSTSSTAESPGPGSTSS | | GAATCTCCTTCTGGCACCGCTCCAGGTACCTCTCCTA | |
| | TAESPGPGTSTPESGSASPG | | GCGGCGAATCTTCTACCGCTCCAGGTTCTACTAGCG | |
| | TSTPESGSASPGSTSESPSG | | AATCTCCTTCTGGCACTGCACCAGGTTCTACCAGCGA | |
| | TAPGTSTPESGSASPGTSTP | | ATCTCCTTCTGGCACCGCTCCAGGTACCTCTCCTAGC | |
| | ESGSASPGSTSESPSGTAPG | | GGCGAATCTTCTACCGCTCCAGGTTCTACTAGCGAAT | |
| | STSESPSGTAPGSTSESPSG | | CTCCTTCTGGCACTGCACCAGGTTCTACCAGCGAATC | |
| | TAPGSTSSTAESPGPGTSTP | | TCCTTCTGGCACCGCTCCAGGTACCTCTCCTAGCGGC | |
| | ESGSASPGTSTPESGSASPG | | GAATCTTCTACCGCTCCAGGTTCTACTAGCGAATCTC | |
| | STSESPSGTAPGSTSESPSG | | CTTCTGGCACTGCACCAGGTTCTACTAGCGAATCTCC | |
| | TAPGTSTPESGSASPGSTSE | | TTCTGGCACTGCACCAGGTTCTACCAGCGAATCTCCG | |
| | SPSGTAPGSTSESPSGTAPG | | TCTGGCACTGCACCAGGTACCTCTACCCCTGAAAGC | |
| | TSTPESGSASPGTSPSGESS | | GGTTCCGCTTCTCCAGGTTCTACTAGCGAATCTCCTT | |
| | TAPGSTSSTAESPGPGTSPS | | CTGGTACCGCTCCAGGTACTTCTACCCCTGAAAGCG | |
| | GESSTAPGSTSSTAESPGPG | | GCTCCGCTTCTCCAGGTTCCACTAGCTCTACCGCTGA | |
| | TSTPESGSASPGSTSESPSG | | ATCTCCGGGTCCAGGTTCTACTAGCTCTACTGCAGAA | |
| | TAPGSTSSTAESPGPGTSTP | | TCTCCTGGCCCAGGTACCTCTACTCCGGAAAGCGGC | |
| | ESGSASPGTSTPESGSASP | | TCTGCATCTCCAGGTACTTCTACCCCTGAAAGCGGTT | |
| | | | CTGCATCTCCAGGTTCTACTAGCGAATCCCCGTCTGG | |
| | | | TACCGCACCAGGTACTTCTACCCCGGAAAGCGGCTC | |
| | | | TGCTTCTCCAGGTACTTCTACCCCGGAAAGCGGCTCC | |
| | | | GCATCTCCAGGTTCTACTAGCGAATCTCCTTCTGGTA | |
| | | | CCGCTCCAGGTTCTACCAGCGAATCCCCGTCTGGTAC | |
| | | | TGCTCCAGGTTCTACCAGCGAATCTCCTTCTGGTACT | |
| | | | GCACCAGGTTCTACTAGCTCTACTGCAGAATCTCCTG | |
| | | | GCCCAGGTACCTCTACTCCGGAAAGCGGCTCTGCAT | |
| | | | CTCCAGGTACTTCTACCCCTGAAAGCGGTTCTGCATC | |
| | | | TCCAGGTTCTACTAGCGAATCTCCTTCTGGCACTGCA | |
| | | | CCAGGTTCTACCAGCGAATCTCCGTCTGGCACTGCA | |
| | | | CCAGGTACCTCTACCCCTGAAAGCGGTTCCGCTTCTC | |
| | | | CAGGTTCTACTAGCGAATCTCCTTCTGGCACTGCACC | |
| | | | AGGTTCTACCAGCGAATCTCCGTCTGGCACTGCACC | |
| | | | AGGTACCTCTACCCCTGAAAGCGGTTCCGCTTCTCCA | |
| | | | GGTACTTCTCCGAGCGGTGAATCTTCTACCGCACCA | |
| | | | GGTTCTACTAGCTCTACCGCTGAATCTCCGGGCCCAG | |
| | | | GTACTTCTCCGAGCGGTGAATCTTCTACTGCTCCAGG | |
| | | | TTCCACTAGCTCTACTGCTGAATCTCCTGGCCCAGGT | |
| | | | ACTTCTACTCCGGAAAGCGGTTCCGCTTCTCCAGGTT | |
| | | | CTACTAGCGAATCTCCGTCTGGCACCGCACCAGGTT | |
| | | | CTACTAGCTCTACTGCAGAATCTCCTGGCCCAGGTAC | |
| | | | CTCTACTCCGGAAAGCGGCTCTGCATCTCCAGGTACT | |
| | | | TCTACCCCTGAAAGCGGTTCTGCATCTCCA | |
| hGH- | FPTIPLSRLFDNAMLRAHR | 715 | TTTCCGACTATTCCGCTGTCTCGTCTGTTTGATAATG | 716 |
| AE624 | LHQLAFDTYQEFEEAYIPK | | CTATGCTGCGTGCGCACCGTCTGCACCAGCTGGCCTT | |
| | EQKYSFLQNPQTSLCFSESI | | TGATACTTACCAGGAATTTGAAGAAGCcTACATTCCT | |
| | PTPSNREETQQKSNLELLRI | | AAAGAGCAGAAGTACTCTTTCCTGCAAAACCCACAG | |
| | SLLLIQSWLEPVQFLRSVF | | ACTTCTCTCTGCTTCAGCGAATCTATTCCGACGCCTT | |
| | ANSLVYGASDSNVYDLLK | | CCAATCGCGAGGAAACTCAGCAAAAGTCCAATCTGG | |
| | DLEEGIQTLMGRLEDGSPR | | AACTACTCCGCATTTCTCTGCTTCTGATTCAGAGCTG | |
| | TGQIFKQTYSKFDTNSHND | | GCTAGAACCAGTGCAATTTCTGCGTTCCGTCTTCGCC | |
| | DALLKNYGLLYCFRKDM | | AATAGCCTAGTTTATGGCGCATCCGACAGCAACGTA | |
| | DKVETFLRIVQCRSVEGSC | | TACGATCTCCTGAAAGATCTCGAGGAAGGCATTCAG | |
| | GFGMAEPAGSPTSTEEGTP | | ACCCTGATGGGTCGTCTCGAGGATGGCTCTCCGCGT | |
| | GSGTASSSPGSSTPSGATG | | ACTGGTCAGATCTTCAAGCAGACTTACTCTAAATTTG | |
| | SPGASPGTSSTGSPGSPAGS | | ATACTAACAGCCACAATGACGATGCGCTTCTAAAAA | |
| | PTSTEEGTSESATPESGPGT | | ACTATGGTCTGCTGTATTGTTTTCGTAAAGATATGGA | |
| | STEPSEGSAPGSPAGSPTST | | CAAAGTTGAAACCTTCCTGCGTATTGTTCAGTGTCGT | |
| | EEGTSTEPSEGSAPGTSTEP | | TCCGTTGAGGGCAGCTGTGGTTTCTAAGGTATGGCT | |
| | SEGSAPGTSESATPESGPGS | | GAACCTGCTGGCTCTCCAACCTCCACTGAGGAAGGT | |
| | EPATSGSETPGSEPATSGSE | | ACCCCGGGTAGCGGTACTGCTTCTTCCTCTCCAGGTA | |
| | TPGSPAGSPTSTEEGTSESA | | GCTCTACCCCTTCTGGTGCAACCGGCTCTCCAGGTGC | |
| | TPESGPGTSTEPSEGSAPGT | | TTCTCCGGGCACCAGCTCTACCGGTTCTCCAGGTAGC | |
| | STEPSEGSAPGSPAGSPTST | | CCGGCTGGCTCTCCTACCTCTACTGAGGAAGGTACTT | |
| | EEGTSTEPSEGSAPGTSTEP | | CTGAAAGCGCTACTCCTGAGTCTGGTCCAGGTACCT | |
| | SEGSAPGTSESATPESGPG | | CTACTGAACCGTCCGAAGGTAGCGCTCCAGGTAGCC | |
| | TSTEPSEGSAPGTSESATPE | | CAGCAGGCTCTCCGACTTCCACTGAGGAAGGTACTT | |
| | SGPGSEPATSGSETPGTSTE | | CTACTGAACCTTCCGAAGGCAGCGCACCAGGTACCT | |
| | PSEGSAPGTSTEPSEGSAPG | | CTACTGAACCTTCTGAGGGCAGCGCTCCAGGTACTT | |
| | TSESATPESGPGTSESATPE | | CTGAAAGCGCTACCCCGGAATCTGGCCCAGGTAGCG | |
| | SGPGSPAGSPTSTEEGTSES | | AACCGGCTACTTCTGGTTCTGAAACCCCAGGTAGCG | |
| | ATPESGPGSEPATSGSETP | | AACCGGCTACCTCCGGTTCTGAAACTCCAGGTAGCC | |
| | GTSESATPESGPGTSTEPSE | | CGGCAGGCTCTCCGACCTCTACTGAGGAAGGTACTT | |
| | GSAPGTSTEPSEGSAPGTS | | CTGAAAGCGCAACCCCGGAGTCCGGCCCAGGTACCT | |
| | TEPSEGSAPGTSTEPSEGSA | | CTACCGAACCGTCTGAGGGCAGCGCACCAGGTACTT | |
| | PGTSTEPSEGSAPGTSTEPS | | CTACCGAACCGTCCGAGGGTAGCGCACCAGGTAGCC | |
| | EGSAPGSPAGSPTSTEEGT | | CAGCAGGTTCTCCTACCTCCACCGAGGAAGGTACTT | |
| | STEPSEGSAPGTSESATPES | | CTACCGAACCGTCCGAGGGTAGCGCACCAGGTACCT | |
| | GPGSEPATSGSETPGTSES | | CTACTGAACCTTCTGAGGGCAGCGCTCCAGGTACTT | |
| | ATPESGPGSEPATSGSETP | | CTGAAAGCGCTACCCCGGAGTCCGGTCCAGGTACTT | |
| | GTSESATPESGPGTSTEPSE | | CTACTGAACCGTCCGAAGGTAGCGCACCAGGTACTT | |
| | GSAPGTSESATPESGPGSP | | CTGAAAGCGCAACCCCTGAATCCGGTCCAGGTAGCG | |
| | AGSPTSTEEGSPAGSPTSTE | | AACCGGCTACTTCTGGCTCTGAGACTCCAGGTACTTC | |
| | EGSPAGSPTSTEEGTSESAT | | TACCGAACCGTCCGAAGGTAGCGCACCAGGTACTTC | |
| | PESGPGTSTEPSEGSAP | | TACTGAACCGTCTGAAGGTAGCGCACCAGGTACTTC | |
| | | | TGAAAGCGCAACCCCGGAATCCGGCCCAGGTACCTC | |
| | | | TGAAAGCGCAACCCCGGAGTCCGGCCCAGGTAGCCC | |
| | | | TGCTGGCTCTCCAACCTCCACCGAAGAAGGTACCTC | |
| | | | TGAAAGCGCAACCCCTGAATCCGGCCCAGGTAGCGA | |
| | | | ACCGGCAACCTCCGGTTCTGAAACCCCAGGTACCTC | |
| | | | TGAAAGCGCTACTCCGGAGTCTGGCCCAGGTACCTC | |
| | | | TACTGAACCGTCTGAGGGTAGCGCTCCAGGTACTTC | |
| | | | TACTGAACCGTCCGAAGGTAGCGCACCAGGTACTTC | |
| | | | TACCGAACCGTCCGAAGGCAGCGCTCCAGGTACCTC | |
| | | | TACTGAACCTTCCGAGGGCAGCGCTCCAGGTACCTC | |
| | | | TACCGAACCTTCTGAAGGTAGCGCACCAGGTACTTC | |
| | | | TACCGAACCGTCCGAGGGTAGCGCACCAGGTAGCCC | |
| | | | AGCAGGTTCTCCTACCTCCACCGAGGAAGGTACTTC | |
| | | | TACCGAACCGTCCGAGGGTAGCGCACCAGGTACCTC | |
| | | | TGAAAGCGCAACTCCTGAGTCTGGCCCAGGTAGCGA | |
| | | | ACCTGCTACCTCCGGCTCTGAGACTCCAGGTACCTCT | |
| | | | GAAAGCGCAACCCCGGAATCTGGTCCAGGTAGCGAA | |
| | | | CCTGCAACCTCTGGCTCTGAAACCCCAGGTACCTCTG | |
| | | | AAAGCGCTACTCCTGAATCTGGCCCAGGTACTTCTA | |
| | | | CTGAACCGTCCGAGGGCAGCGCACCAGGTACTTCTG | |
| | | | AAAGCGCTACTCCTGAGTCCGGCCCAGGTAGCCCGG | |
| | | | CTGGCTCTCCGACTTCCACCGAGGAAGGTAGCCCGG | |
| | | | CTGGCTCTCCAACTTCTACTGAAGAAGGTAGCCCGG | |
| | | | CAGGCTCTCCGACCTCTACTGAGGAAGGTACTTCTG | |
| | | | AAAGCGCAACCCCGGAGTCCGGCCCAGGTACCTCTA | |
| | | | CCGAACCGTCTGAGGGCAGCGCACCA | |
| hGH- | FPTIPLSRLFDNAMLRAHR | 717 | TTTCCGACTATTCCGCTGTCTCGTCTGTTTGATAATG | 718 |
| AD836 | LHQLAFDTYQEFEEAYIPK | | CTATGCTGCGTGCGCACCGTCTGCACCAGCTGGCCTT | |
| | EQKYSFLQNPQTSLCFSESI | | TGATACTTACCAGGAATTTGAAGAAGCcTACATTCCT | |
| | PTPSNREETQQKSNLELLRI | | AAAGAGCAGAAGTACTCTTTCCTGCAAAACCCACAG | |
| | SLLLIQSWLEPVQFLRSVF | | ACTTCTCTCTGCTTCAGCGAATCTATTCCGACGCCTT | |
| | ANSLVYGASDSNVYDLLK | | CCAATCGCGAGGAAACTCAGCAAAAGTCCAATCTGG | |
| | DLEEGIQTLMGRLEDGSPR | | AACTACTCCGCATTTCTCTGCTTCTGATTCAGAGCTG | |
| | TGQIFKQTYSKFDTNSHND | | GCTAGAACCAGTGCAATTTCTGCGTTCCGTCTTCGCC | |
| | DALLKNYGLLYCFRKDM | | AATAGCCTAGTTTATGGCGCATCCGACAGCAACGTA | |
| | DKVETFLRIVQCRSVEGSC | | TACGATCTCCTGAAAGATCTCGAGGAAGGCATTCAG | |
| | GFGGSSESGSSEGGPGSSE | | ACCCTGATGGGTCGTCTCGAGGATGGCTCTCCGCGT | |
| | SGSSEGGPGESPGGSSGSE | | ACTGGTCAGATCTTCAAGCAGACTTACTCTAAATTTG | |
| | SGSGGEPSESGSSGESPGG | | ATACTAACAGCCACAATGACGATGCGCTTCTAAAAA | |
| | SSGSESGESPGGSSGSESGS | | ACTATGGTCTGCTGTATTGTTTTCGTAAAGATATGGA | |
| | SESGSSEGGPGSSESGSSEG | | CAAAGTTGAAACCTTCCTGCGTATTGTTCAGTGTCGT | |
| | GPGSSESGSSEGGPGESPG | | TCCGTTGAGGGCAGCTGTGGTTTCTAAGGTGGTTCCT | |
| | GSSGSESGESPGGSSGSES | | CTGAAAGCGGTTCTTCCGAAGGTGGTCCAGGTTCCT | |
| | GESPGGSSGSESGSSESGSS | | CTGAAAGCGGTTCTTCTGAGGGTGGTCCAGGTGAAT | |
| | EGGPGSSESGSSEGGPGSS | | CTCCGGGTGGCTCCAGCGGTTCCGAGTCAGGTTCTG | |
| | ESGSSEGGPGSSESGSSEG | | GTGGCGAACCTTCCGAGTCTGGTAGCTCAGGTGAAT | |
| | GPGSSESGSSEGGPGSSES | | CTCCGGGTGGTTCTAGCGGTTCCGAGTCAGGTGAAT | |
| | GSSEGGPGSGGEPSESGSS | | CTCCGGGTGGTTCCAGCGGTTCTGAGTCAGGTTCCTC | |
| | GESPGGSSGSESGESPGGS | | CGAAAGCGGTTCTTCTGAGGGCGGTCCAGGTTCCTC | |
| | SGSESGSGGEPSESGSSGSE | | CGAAAGCGGTTCTTCCGAGGGCGGTCCAGGTTCTTC | |
| | GSSGPGESSGSSESGSSEG | | TGAAAGCGGTTCTTCCGAGGGCGGTCCAGGTGAATC | |
| | GPGSGGEPSESGSSGSEGS | | TCCTGGTGGTTCCAGCGGTTCCGAGTCAGGTGAATCT | |
| | SGPGESSGSSESGSSEGGP | | CCAGGTGGCTCTAGCGGTTCCGAGTCAGGTGAATCT | |
| | GSGGEPSESGSSGESPGGS | | CCTGGTGGTTCTAGCGGTTCTGAATCAGGTTCCTCCG | |
| | SGSESGSGGEPSESGSSGS | | AAAGCGGTTCTTCTGAGGGCGGTCCAGGTTCCTCCG | |
| | GGEPSESGSSGSSESGSSEG | | AAAGCGGTTCTTCCGAGGGCGGTCCAGGTTCTTCTG | |
| | GPGSGGEPSESGSSGSGGE | | AAAGCGGTTCTTCCGAGGGCGGTCCAGGTTCCTCTG | |
| | PSESGSSGSEGSSGPGESSG | | AAAGCGGTTCTTCTGAGGGCGGTCCAGGTTCTTCCG | |
| | ESPGGSSGSESGSEGSSGP | | AAAGCGGTTCTTCCGAGGGCGGTCCAGGTTCTTCCG | |
| | GESSGSEGSSGPGESSGSG | | AAAGCGGTTCTTCTGAAGGCGGTCCAGGTTCTGGTG | |
| | GEPSESGSSGSSESGSSEGG | | GCGAACCGTCCGAGTCTGGTAGCTCAGGTGAATCTC | |
| | PGSSESGSSEGGPGESPGG | | CGGGTGGCTCTAGCGGTTCCGAGTCAGGTGAATCTC | |
| | SSGSESGSGGEPSESGSSGS | | CTGGTGGTTCCAGCGGTTCCGAGTCAGGTTCCGGTG | |
| | EGSSGPGESSGESPGGSSG | | GCGAACCGTCCGAATCTGGTAGCTCAGGTAGCGAAG | |
| | SESGSEGSSGPGSSESGSSE | | GTTCTTCTGGTCCAGGCGAATCTTCAGGTTCCTCTGA | |
| | GGPGSGGEPSESGSSGSEG | | AAGCGGTTCTTCTGAGGGCGGTCCAGGTTCCGGTGG | |
| | SSGPGESSGSEGSSGPGESS | | CGAACCGTCCGAATCTGGTAGCTCAGGTAGCGAAGG | |
| | GSEGSSGPGESSGSGGEPS | | TTCTTCTGGTCCAGGCGAATCTTCAGGTTCCTCTGAA | |
| | ESGSSGSGGEPSESGSSGES | | AGCGGTTCTTCTGAGGGCGGTCCAGGTTCCGGTGGC | |
| | PGGSSGSESGESPGGSSGS | | GAACCTTCCGAATCTGGTAGCTCAGGTGAATCTCCG | |
| | ESGSGGEPSESGSSGSEGSS | | GGTGGTTCTAGCGGTTCTGAGTCAGGTTCTGGTGGTG | |
| | GPGESSGESPGGSSGSESG | | AACCTTCCGAGTCTGGTAGCTCAGGTTCTGGTGGCG | |
| | SSESGSSEGGPGSSESGSSE | | AACCATCCGAGTCTGGTAGCTCAGGTTCTTCCGAAA | |
| | GGPGSSESGSSEGGPGSGG | | GCGGTTCTTCCGAAGGCGGTCCAGGTTCTGGTGGTG | |
| | EPSESGSSGSSESGSSEGGP | | AACCGTCCGAATCTGGTAGCTCAGGTTCTGGTGGCG | |
| | GESPGGSSGSESGSGGEPS | | AACCATCCGAATCTGGTAGCTCAGGTAGCGAAGGTT | |
| | ESGSSGSSESGSSEGGPGES | | CTTCTGGTCCTGGCGAATCTTCAGGTGAATCTCCAGG | |
| | PGGSSGSESGSGGEPSESG | | TGGCTCTAGCGGTTCCGAATCAGGTAGCGAAGGTTC | |
| | SSGESPGGSSGSESGSGGE | | TTCCGGTCCAGGTGAATCTTCAGGTAGCGAAGGTTC | |
| | PSESGSS | | TTCTGGTCCTGGTGAATCCTCAGGTTCCGGTGGCGAA | |
| | | | CCATCTGAATCTGGTAGCTCAGGTTCCTCTGAAAGC | |
| | | | GGTTCTTCCGAAGGTGGTCCAGGTTCCTCTGAAAGC | |
| | | | GGTTCTTCTGAGGGTGGTCCAGGTGAATCTCCGGGT | |
| | | | GGCTCCAGCGGTTCCGAGTCAGGTTCTGGTGGCGAA | |
| | | | CCATCCGAATCTGGTAGCTCAGGTAGCGAAGGTTCT | |
| | | | TCTGGTCCTGGCGAATCTTCAGGTGAATCTCCAGGTG | |
| | | | GCTCTAGCGGTTCCGAATCAGGTAGCGAAGGTTCTT | |
| | | | CCGGTCCaGGTTCCTCTGAAAGCGGTTCTTCTGAGGG | |
| | | | CGGTCCAGGTTCTGGTGGCGAACCATCTGAATCTGG | |
| | | | TAGCTCAGGTAGCGAAGGTTCTTCCGGTCCGGGTGA | |
| | | | ATCTTCAGGTAGCGAAGGTTCTTCCGGTCCAGGTGA | |
| | | | ATCTTCAGGTAGCGAAGGTTCTTCTGGTCCTGGTGAA | |
| | | | TCCTCAGGTTCCGGTGGCGAACCATCTGAATCTGGT | |
| | | | AGCTCAGGTTCTGGTGGCGAACCATCCGAATCTGGT | |
| | | | AGCTCAGGTGAATCTCCGGGTGGCTCCAGCGGTTCT | |
| | | | GAATCAGGTGAATCTCCTGGTGGCTCCAGCGGTTCT | |
| | | | GAGTCAGGTTCTGGTGGCGAACCATCCGAATCTGGT | |
| | | | AGCTCAGGTAGCGAAGGTTCTTCTGGTCCTGGCGAA | |
| | | | TCTTCAGGTGAATCTCCAGGTGGCTCTAGCGGTTCCG | |
| | | | AATCAGGTTCCTCTGAAAGCGGTTCTTCTGAGGGCG | |
| | | | GTCCAGGTTCTTCCGAAAGCGGTTCTTCCGAGGGCG | |
| | | | GTCCAGGTTCTTCCGAAAGCGGTTCTTCTGAAGGCG | |
| | | | GTCCAGGTTCTGGTGGCGAACCGTCCGAATCTGGTA | |
| | | | GCTCAGGTTCCTCCGAAAGCGGTTCTTCTGAAGGTG | |
| | | | GTCCAGGTGAATCTCCAGGTGGTTCTAGCGGTTCTG | |
| | | | AATCAGGTTCTGGTGGCGAACCGTCCGAATCTGGTA | |
| | | | GCTCAGGTTCCTCCGAAAGCGGTTCTTCTGAAGGTG | |
| | | | GTCCAGGTGAATCTCCAGGTGGTTCTAGCGGTTCTG | |
| | | | AATCAGGTTCTGGTGGCGAACCGTCCGAATCTGGTA | |
| | | | GCTCAGGTGAATCTCCTGGTGGTTCCAGCGGTTCCG | |
| | | | AGTCAGGTTCTGGTGGCGAACCTTCCGAATCTGGTA | |
| | | | GCTCA | |
| hGH- | FPTIPLSRLFDNAMLRAHR | 719 | TTTCCGACTATTCCGCTGTCTCGTCTGTTTGATAATG | 720 |
| AE864 | LHQLAFDTYQEFEEAYIPK | | CTATGCTGCGTGCGCACCGTCTGCACCAGCTGGCCTT | |
| | EQKYSFLQNPQTSLCFSESI | | TGATACTTACCAGGAATTTGAAGAAGCcTACATTCCT | |
| | PTPSNREETQQKSNLELLRI | | AAAGAGCAGAAGTACTCTTTCCTGCAAAACCCACAG | |
| | SLLLIQSWLEPVQFLRSVF | | ACTTCTCTCTGCTTCAGCGAATCTATTCCGACGCCTT | |
| | ANSLVYGASDSNVYDLLK | | CCAATCGCGAGGAAACTCAGCAAAAGTCCAATCTGG | |
| | DLEEGIQTLMGRLEDGSPR | | AACTACTCCGCATTTCTCTGCTTCTGATTCAGAGCTG | |
| | TGQIFKQTYSKFDTNSHND | | GCTAGAACCAGTGCAATTTCTGCGTTCCGTCTTCGCC | |
| | DALLKNYGLLYCFRKDM | | AATAGCCTAGTTTATGGCGCATCCGACAGCAACGTA | |
| | DKVETFLRIVQCRSVEGSC | | TACGATCTCCTGAAAGATCTCGAGGAAGGCATTCAG | |
| | GFGGSPAGSPTSTEEGTSE | | ACCCTGATGGGTCGTCTCGAGGATGGCTCTCCGCGT | |
| | SATPESGPGTSTEPSEGSAP | | ACTGGTCAGATCTTCAAGCAGACTTACTCTAAATTTG | |
| | GSPAGSPTSTEEGTSTEPSE | | ATACTAACAGCCACAATGACGATGCGCTTCTAAAAA | |
| | GSAPGTSTEPSEGSAPGTS | | ACTATGGTCTGCTGTATTGTTTTCGTAAAGATATGGA | |
| | ESATPESGPGSEPATSGSET | | CAAAGTTGAAACCTTCCTGCGTATTGTTCAGTGTCGT | |
| | PGSEPATSGSETPGSPAGSP | | TCCGTTGAGGGCAGCTGTGGTTTCTAAGGTGGTAGC | |
| | TSTEEGTSESATPESGPGTS | | CCGGCTGGCTCTCCTACCTCTACTGAGGAAGGTACTT | |
| | TEPSEGSAPGTSTEPSEGSA | | CTGAAAGCGCTACTCCTGAGTCTGGTCCAGGTACCT | |
| | PGSPAGSPTSTEEGTSTEPS | | CTACTGAACCGTCCGAAGGTAGCGCTCCAGGTAGCC | |
| | EGSAPGTSTEPSEGSAPGT | | CAGCAGGCTCTCCGACTTCCACTGAGGAAGGTACTT | |
| | SESATPESGPGTSTEPSEGS | | CTACTGAACCTTCCGAAGGCAGCGCACCAGGTACCT | |
| | APGTSESATPESGPGSEPA | | CTACTGAACCTTCTGAGGGCAGCGCTCCAGGTACTT | |
| | TSGSETPGTSTEPSEGSAPG | | CTGAAAGCGCTACCCCGGAATCTGGCCCAGGTAGCG | |
| | TSTEPSEGSAPGTSESATPE | | AACCGGCTACTTCTGGTTCTGAAACCCCAGGTAGCG | |
| | SGPGTSESATPESGPGSPA | | AACCGGCTACCTCCGGTTCTGAAACTCCAGGTAGCC | |
| | GSPTSTEEGTSESATPESGP | | CGGCAGGCTCTCCGACCTCTACTGAGGAAGGTACTT | |
| | GSEPATSGSETPGTSESATP | | CTGAAAGCGCAACCCCGGAGTCCGGCCCAGGTACCT | |
| | ESGPGTSTEPSEGSAPGTST | | CTACCGAACCGTCTGAGGGCAGCGCACCAGGTACTT | |
| | EPSEGSAPGTSTEPSEGSAP | | CTACCGAACCGTCCGAGGGTAGCGCACCAGGTAGCC | |
| | GTSTEPSEGSAPGTSTEPSE | | CAGCAGGTTCTCCTACCTCCACCGAGGAAGGTACTT | |
| | GSAPGTSTEPSEGSAPGSP | | CTACCGAACCGTCCGAGGGTAGCGCACCAGGTACCT | |
| | AGSPTSTEEGTSTEPSEGSA | | CTACTGAACCTTCTGAGGGCAGCGCTCCAGGTACTT | |
| | PGTSESATPESGPGSEPATS | | CTGAAAGCGCTACCCCGGAGTCCGGTCCAGGTACTT | |
| | GSETPGTSESATPESGPGSE | | CTACTGAACCGTCCGAAGGTAGCGCACCAGGTACTT | |
| | PATSGSETPGTSESATPESG | | CTGAAAGCGCAACCCCTGAATCCGGTCCAGGTAGCG | |
| | PGTSTEPSEGSAPGTSESAT | | AACCGGCTACTTCTGGCTCTGAGACTCCAGGTACTTC | |
| | PESGPGSPAGSPTSTEEGSP | | TACCGAACCGTCCGAAGGTAGCGCACCAGGTACTTC | |
| | AGSPTSTEEGSPAGSPTSTE | | TACTGAACCGTCTGAAGGTAGCGCACCAGGTACTTC | |
| | EGTSESATPESGPGTSTEPS | | TGAAAGCGCAACCCCGGAATCCGGCCCAGGTACCTC | |
| | EGSAPGTSESATPESGPGS | | TGAAAGCGCAACCCCGGAGTCCGGCCCAGGTAGCCC | |
| | EPATSGSETPGTSESATPES | | TGCTGGCTCTCCAACCTCCACCGAAGAAGGTACCTC | |
| | GPGSEPATSGSETPGTSES | | TGAAAGCGCAACCCCTGAATCCGGCCCAGGTAGCGA | |
| | ATPESGPGTSTEPSEGSAP | | ACCGGCAACCTCCGGTTCTGAAACCCCAGGTACCTC | |
| | GSPAGSPTSTEEGTSESATP | | TGAAAGCGCTACTCCGGAGTCTGGCCCAGGTACCTC | |
| | ESGPGSEPATSGSETPGTSE | | TACTGAACCGTCTGAGGGTAGCGCTCCAGGTACTTC | |
| | SATPESGPGSPAGSPTSTEE | | TACTGAACCGTCCGAAGGTAGCGCACCAGGTACTTC | |
| | GSPAGSPTSTEEGTSTEPSE | | TACCGAACCGTCCGAAGGCAGCGCTCCAGGTACCTC | |
| | GSAPGTSESATPESGPGTS | | TACTGAACCTTCCGAGGGCAGCGCTCCAGGTACCTC | |
| | ESATPESGPGTSESATPESG | | TACCGAACCTTCTGAAGGTAGCGCACCAGGTACTTC | |
| | PGSEPATSGSETPGSEPATS | | TACCGAACCGTCCGAGGGTAGCGCACCAGGTAGCCC | |
| | GSETPGSPAGSPTSTEEGTS | | AGCAGGTTCTCCTACCTCCACCGAGGAAGGTACTTC | |
| | TEPSEGSAPGTSTEPSEGSA | | TACCGAACCGTCCGAGGGTAGCGCACCAGGTACCTC | |
| | PGSEPATSGSETPGTSESAT | | TGAAAGCGCAACTCCTGAGTCTGGCCCAGGTAGCGA | |
| | PESGPGTSTEPSEGSAP | | ACCTGCTACCTCCGGCTCTGAGACTCCAGGTACCTCT | |
| | | | GAAAGCGCAACCCCGGAATCTGGTCCAGGTAGCGAA | |
| | | | CCTGCAACCTCTGGCTCTGAAACCCCAGGTACCTCTG | |
| | | | AAAGCGCTACTCCTGAATCTGGCCCAGGTACTTCTA | |
| | | | CTGAACCGTCCGAGGGCAGCGCACCAGGTACTTCTG | |
| | | | AAAGCGCTACTCCTGAGTCCGGCCCAGGTAGCCCGG | |
| | | | CTGGCTCTCCGACTTCCACCGAGGAAGGTAGCCCGG | |
| | | | CTGGCTCTCCAACTTCTACTGAAGAAGGTAGCCCGG | |
| | | | CAGGCTCTCCGACCTCTACTGAGGAAGGTACTTCTG | |
| | | | AAAGCGCAACCCCGGAGTCCGGCCCAGGTACCTCTA | |
| | | | CCGAACCGTCTGAGGGCAGCGCACCAGGTACCTCTG | |
| | | | AAAGCGCAACTCCTGAGTCTGGCCCAGGTAGCGAAC | |
| | | | CTGCTACCTCCGGCTCTGAGACTCCAGGTACCTCTGA | |
| | | | AAGCGCAACCCCGGAATCTGGTCCAGGTAGCGAACC | |
| | | | TGCAACCTCTGGCTCTGAAACCCCAGGTACCTCTGA | |
| | | | AAGCGCTACTCCTGAATCTGGCCCAGGTACTTCTACT | |
| | | | GAACCGTCCGAGGGCAGCGCACCAGGTAGCCCTGCT | |
| | | | GGCTCTCCAACCTCCACCGAAGAAGGTACCTCTGAA | |
| | | | AGCGCAACCCCTGAATCCGGCCCAGGTAGCGAACCG | |
| | | | GCAACCTCCGGTTCTGAAACCCCAGGTACTTCTGAA | |
| | | | AGCGCTACTCCTGAGTCCGGCCCAGGTAGCCCGGCT | |
| | | | GGCTCTCCGACTTCCACCGAGGAAGGTAGCCCGGCT | |
| | | | GGCTCTCCAACTTCTACTGAAGAAGGTACTTCTACCG | |
| | | | AACCTTCCGAGGGCAGCGCACCAGGTACTTCTGAAA | |
| | | | GCGCTACCCCTGAGTCCGGCCCAGGTACTTCTGAAA | |
| | | | GCGCTACTCCTGAATCCGGTCCAGGTACTTCTGAAA | |
| | | | GCGCTACCCCGGAATCTGGCCCAGGTAGCGAACCGG | |
| | | | CTACTTCTGGTTCTGAAACCCCAGGTAGCGAACCGG | |
| | | | CTACCTCCGGTTCTGAAACTCCAGGTAGCCCAGCAG | |
| | | | GCTCTCCGACTTCCACTGAGGAAGGTACTTCTACTGA | |
| | | | ACCTTCCGAAGGCAGCGCACCAGGTACCTCTACTGA | |
| | | | ACCTTCTGAGGGCAGCGCTCCAGGTAGCGAACCTGC | |
| | | | AACCTCTGGCTCTGAAACCCCAGGTACCTCTGAAAG | |
| | | | CGCTACTCCTGAATCTGGCCCAGGTACTTCTACTGAA | |
| | | | CCGTCCGAGGGCAGCGCACCA | |
| hGH- | FPTIPLSRLFDNAMLRAHR | 721 | TTTCCGACTATTCCGCTGTCTCGTCTGTTTGATAATG | 722 |
| AF864 | LHQLAFDTYQEFEEAYIPK | | CTATGCTGCGTGCGCACCGTCTGCACCAGCTGGCCTT | |
| | EQKYSFLQNPQTSLCFSESI | | TGATACTTACCAGGAATTTGAAGAAGCcTACATTCCT | |
| | PTPSNREETQQKSNLELLRI | | AAAGAGCAGAAGTACTCTTTCCTGCAAAACCCACAG | |
| | SLLLIQSWLEPVQFLRSVF | | ACTTCTCTCTGCTTCAGCGAATCTATTCCGACGCCTT | |
| | ANSLVYGASDSNVYDLLK | | CCAATCGCGAGGAAACTCAGCAAAAGTCCAATCTGG | |
| | DLEEGIQTLMGRLEDGSPR | | AACTACTCCGCATTTCTCTGCTTCTGATTCAGAGCTG | |
| | TGQIFKQTYSKFDTNSHND | | GCTAGAACCAGTGCAATTTCTGCGTTCCGTCTTCGCC | |
| | DALLKNYGLLYCFRKDM | | AATAGCCTAGTTTATGGCGCATCCGACAGCAACGTA | |
| | DKVETFLRIVQCRSVEGSC | | TACGATCTCCTGAAAGATCTCGAGGAAGGCATTCAG | |
| | GFGGSTSESPSGTAPGTSPS | | ACCCTGATGGGTCGTCTCGAGGATGGCTCTCCGCGT | |
| | GESSTAPGSTSESPSGTAPG | | ACTGGTCAGATCTTCAAGCAGACTTACTCTAAATTTG | |
| | STSESPSGTAPGTSTPESGS | | ATACTAACAGCCACAATGACGATGCGCTTCTAAAAA | |
| | ASPGTSTPESGSASPGSTSE | | ACTATGGTCTGCTGTATTGTTTTCGTAAAGATATGGA | |
| | SPSGTAPGSTSESPSGTAPG | | CAAAGTTGAAACCTTCCTGCGTATTGTTCAGTGTCGT | |
| | TSPSGESSTAPGSTSESPSG | | TCCGTTGAGGGCAGCTGTGGTTTCTAAGGTGGTTCTA | |
| | TAPGTSPSGESSTAPGTSPS | | CCAGCGAATCTCCTTCTGGCACCGCTCCAGGTACCTC | |
| | GESSTAPGSTSSTAESPGPG | | TCCTAGCGGCGAATCTTCTACCGCTCCAGGTTCTACT | |
| | TSPSGESSTAPGTSPSGESS | | AGCGAATCTCCTTCTGGCACTGCACCAGGTTCTACTA | |
| | TAPGSTSSTAESPGPGTSTP | | GCGAATCCCCGTCTGGTACTGCTCCAGGTACTTCTAC | |
| | ESGSASPGTSTPESGSASPG | | TCCTGAAAGCGGTTCCGCTTCTCCAGGTACCTCTACT | |
| | STSESPSGTAPGSTSESPSG | | CCGGAAAGCGGTTCTGCATCTCCAGGTTCTACCAGC | |
| | TAPGTSTPESGSASPGSTSS | | GAATCTCCTTCTGGCACCGCTCCAGGTTCTACTAGCG | |
| | TAESPGPGTSTPESGSASPG | | AATCCCCGTCTGGTACCGCACCAGGTACTTCTCCTAG | |
| | STSESPSGTAPGTSPSGESS | | CGGCGAATCTTCTACCGCACCAGGTTCTACTAGCGA | |
| | TAPGSTSSTAESPGPGTSPS | | ATCTCCGTCTGGCACTGCTCCAGGTACTTCTCCTAGC | |
| | GESSTAPGTSTPESGSASPG | | GGTGAATCTTCTACCGCTCCAGGTACTTCCCCTAGCG | |
| | STSSTAESPGPGSTSSTAES | | GCGAATCTTCTACCGCTCCAGGTTCTACTAGCTCTAC | |
| | PGPGSTSSTAESPGPGSTSS | | TGCAGAATCTCCGGGCCCAGGTACCTCTCCTAGCGG | |
| | TAESPGPGTSPSGESSTAPG | | TGAATCTTCTACCGCTCCAGGTACTTCTCCGAGCGGT | |
| | STSESPSGTAPGSTSESPSG | | GAATCTTCTACCGCTCCAGGTTCTACTAGCTCTACTG | |
| | TAPGTSTPESGPXXXGASA | | CAGAATCTCCTGGCCCAGGTACCTCTACTCCGGAAA | |
| | SGAPSTXXXXSESPSGTAP | | GCGGCTCTGCATCTCCAGGTACTTCTACCCCTGAAAG | |
| | GSTSESPSGTAPGSTSESPS | | CGGTTCTGCATCTCCAGGTTCTACTAGCGAATCTCCT | |
| | GTAPGSTSESPSGTAPGSTS | | TCTGGCACTGCACCAGGTTCTACCAGCGAATCTCCGT | |
| | ESPSGTAPGSTSESPSGTAP | | CTGGCACTGCACCAGGTACCTCTACCCCTGAAAGCG | |
| | GTSTPESGSASPGTSPSGES | | GTTCCGCTTCTCCAGGTTCTACCAGCTCTACCGCAGA | |
| | STAPGTSPSGESSTAPGSTS | | ATCTCCTGGTCCAGGTACCTCTACTCCGGAAAGCGG | |
| | STAESPGPGTSPSGESSTAP | | CTCTGCATCTCCAGGTTCTACTAGCGAATCTCCTTCT | |
| | GTSTPESGSASPGSTSESPS | | GGCACTGCACCAGGTACTTCTCCGAGCGGTGAATCT | |
| | GTAPGSTSESPSGTAPGTSP | | TCTACCGCACCAGGTTCTACTAGCTCTACCGCTGAAT | |
| | SGESSTAPGSTSESPSGTAP | | CTCCGGGCCCAGGTACTTCTCCGAGCGGTGAATCTTC | |
| | GTSTPESGSASPGTSTPESG | | TACTGCTCCAGGTACCTCTACTCCTGAAAGCGGTTCT | |
| | SASPGSTSESPSGTAPGTST | | GCATCTCCAGGTTCCACTAGCTCTACCGCAGAATCTC | |
| | PESGSASPGSTSSTAESPGP | | CGGGCCCAGGTTCTACTAGCTCTACTGCTGAATCTCC | |
| | GSTSESPSGTAPGSTSESPS | | TGGCCCAGGTTCTACTAGCTCTACTGCTGAATCTCCG | |
| | GTAPGTSPSGESSTAPGSTS | | GGTCCAGGTTCTACCAGCTCTACTGCTGAATCTCCTG | |
| | STAESPGPGTSPSGESSTAP | | GTCCAGGTACCTCCCCGAGCGGTGAATCTTCTACTGC | |
| | GTSTPESGSASPGTSPSGES | | ACCAGGTTCTACTAGCGAATCTCCTTCTGGCACTGCA | |
| | STAPGTSPSGESSTAPGTSP | | CCAGGTTCTACCAGCGAATCTCCGTCTGGCACTGCA | |
| | SGESSTAPGSTSSTAESPGP | | CCAGGTACCTCTACCCCTGAAAGCGGTCCXXXXXXX | |
| | GSTSSTAESPGPGTSPSGES | | XXXXXTGCAAGCGCAAGCGGCGCGCCAAGCACGGG | |
| | STAPGSSPSASTGTGPGSST | | AXXXXXXXXTAGCGAATCTCCTTCTGGTACCGCTCC | |
| | PSGATGSPGSSTPSGATGSP | | AGGTTCTACCAGCGAATCCCCGTCTGGTACTGCTCCA | |
| | | | GGTTCTACCAGCGAATCTCCTTCTGGTACTGCACCAG | |
| | | | GTTCTACTAGCGAATCTCCTTCTGGTACCGCTCCAGG | |
| | | | TTCTACCAGCGAATCCCCGTCTGGTACTGCTCCAGGT | |
| | | | TCTACCAGCGAATCTCCTTCTGGTACTGCACCAGGTA | |
| | | | CTTCTACTCCGGAAAGCGGTTCCGCATCTCCAGGTAC | |
| | | | TTCTCCTAGCGGTGAATCTTCTACTGCTCCAGGTACC | |
| | | | TCTCCTAGCGGCGAATCTTCTACTGCTCCAGGTTCTA | |
| | | | CCAGCTCTACTGCTGAATCTCCGGGTCCAGGTACTTC | |
| | | | CCCGAGCGGTGAATCTTCTACTGCACCAGGTACTTCT | |
| | | | ACTCCGGAAAGCGGTTCCGCTTCTCCAGGTTCTACCA | |
| | | | GCGAATCTCCTTCTGGCACCGCTCCAGGTTCTACTAG | |
| | | | CGAATCCCCGTCTGGTACCGCACCAGGTACTTCTCCT | |
| | | | AGCGGCGAATCTTCTACCGCACCAGGTTCTACTAGC | |
| | | | GAATCCCCGTCTGGTACCGCACCAGGTACTTCTACCC | |
| | | | CGGAAAGCGGCTCTGCTTCTCCAGGTACTTCTACCCC | |
| | | | GGAAAGCGGCTCCGCATCTCCAGGTTCTACTAGCGA | |
| | | | ATCTCCTTCTGGTACCGCTCCAGGTACTTCTACCCCT | |
| | | | GAAAGCGGCTCCGCTTCTCCAGGTTCCACTAGCTCTA | |
| | | | CCGCTGAATCTCCGGGTCCAGGTTCTACCAGCGAAT | |
| | | | CTCCTTCTGGCACCGCTCCAGGTTCTACTAGCGAATC | |
| | | | CCCGTCTGGTACCGCACCAGGTACTTCTCCTAGCGGC | |
| | | | GAATCTTCTACCGCACCAGGTTCTACCAGCTCTACTG | |
| | | | CTGAATCTCCGGGTCCAGGTACTTCCCCGAGCGGTG | |
| | | | AATCTTCTACTGCACCAGGTACTTCTACTCCGGAAAG | |
| | | | CGGTTCCGCTTCTCCAGGTACCTCCCCTAGCGGCGAA | |
| | | | TCTTCTACTGCTCCAGGTACCTCTCCTAGCGGCGAAT | |
| | | | CTTCTACCGCTCCAGGTACCTCCCCTAGCGGTGAATC | |
| | | | TTCTACCGCACCAGGTTCTACTAGCTCTACTGCTGAA | |
| | | | TCTCCGGGTCCAGGTTCTACCAGCTCTACTGCTGAAT | |
| | | | CTCCTGGTCCAGGTACCTCCCCGAGCGGTGAATCTTC | |
| | | | TACTGCACCAGGTTCTAGCCCTTCTGCTTCCACCGGT | |
| | | | ACCGGCCCAGGTAGCTCTACTCCGTCTGGTGCAACT | |
| | | | GGCTCTCCAGGTAGCTCTACTCCGTCTGGTGCAACCG | |
| | | | GCTCCCCA | |
| hGH- | FPTIPLSRLFDNAMLRAHR | 723 | TTTCCGACTATTCCGCTGTCTCGTCTGTTTGATAATG | 724 |
| AG864 | LHQLAFDTYQEFEEAYIPK | | CTATGCTGCGTGCGCACCGTCTGCACCAGCTGGCCTT | |
| | EQKYSFLQNPQTSLCFSESI | | TGATACTTACCAGGAATTTGAAGAAGCcTACATTCCT | |
| | PTPSNREETQQKSNLELLRI | | AAAGAGCAGAAGTACTCTTTCCTGCAAAACCCACAG | |
| | SLLLIQSWLEPVQFLRSVF | | ACTTCTCTCTGCTTCAGCGAATCTATTCCGACGCCTT | |
| | ANSLVYGASDSNVYDLLK | | CCAATCGCGAGGAAACTCAGCAAAAGTCCAATCTGG | |
| | DLEEGIQTLMGRLEDGSPR | | AACTACTCCGCATTTCTCTGCTTCTGATTCAGAGCTG | |
| | TGQIFKQTYSKFDTNSHND | | GCTAGAACCAGTGCAATTTCTGCGTTCCGTCTTCGCC | |
| | DALLKNYGLLYCFRKDM | | AATAGCCTAGTTTATGGCGCATCCGACAGCAACGTA | |
| | DKVETFLRIVQCRSVEGSC | | TACGATCTCCTGAAAGATCTCGAGGAAGGCATTCAG | |
| | GFGGASPGTSSTGSPGSSPS | | ACCCTGATGGGTCGTCTCGAGGATGGCTCTCCGCGT | |
| | ASTGTGPGSSPSASTGTGP | | ACTGGTCAGATCTTCAAGCAGACTTACTCTAAATTTG | |
| | GTPGSGTASSSPGSSTPSG | | ATACTAACAGCCACAATGACGATGCGCTTCTAAAAA | |
| | ATGSPGSNPSASTGTGPGA | | ACTATGGTCTGCTGTATTGTTTTCGTAAAGATATGGA | |
| | SPGTSSTGSPGTPGSGTASS | | CAAAGTTGAAACCTTCCTGCGTATTGTTCAGTGTCGT | |
| | SPGSSTPSGATGSPGTPGS | | TCCGTTGAGGGCAGCTGTGGTTTCTAAGGTGGTGCTT | |
| | GTASSSPGASPGTSSTGSP | | CCCCGGGCACCAGCTCTACTGGTTCTCCAGGTTCTAG | |
| | GASPGTSSTGSPGTPGSGT | | CCCGTCTGCTTCTACTGGTACTGGTCCAGGTTCTAGC | |
| | ASSSPGSSTPSGATGSPGAS | | CCTTCTGCTTCCACTGGTACTGGTCCAGGTACCCCGG | |
| | PGTSSTGSPGTPGSGTASSS | | GTAGCGGTACCGCTTCTTCTTCTCCAGGTAGCTCTAC | |
| | PGSSTPSGATGSPGSNPSAS | | TCCGTCTGGTGCTACCGGCTCTCCAGGTTCTAACCCT | |
| | TGTGPGSSPSASTGTGPGS | | TCTGCATCCACCGGTACCGGCCCAGGTGCTTCTCCGG | |
| | STPSGATGSPGSSTPSGAT | | GCACCAGCTCTACTGGTTCTCCAGGTACCCCGGGCA | |
| | GSPGASPGTSSTGSPGASP | | GCGGTACCGCATCTTCTTCTCCAGGTAGCTCTACTCC | |
| | GTSSTGSPGASPGTSSTGSP | | TTCTGGTGCAACTGGTTCTCCAGGTACTCCTGGCAGC | |
| | GTPGSGTASSSPGASPGTS | | GGTACCGCTTCTTCTTCTCCAGGTGCTTCTCCTGGTA | |
| | STGSPGASPGTSSTGSPGA | | CTAGCTCTACTGGTTCTCCAGGTGCTTCTCCGGGCAC | |
| | SPGTSSTGSPGSSPSASTGT | | TAGCTCTACTGGTTCTCCAGGTACCCCGGGTAGCGGT | |
| | GPGTPGSGTASSSPGASPG | | ACTGCTTCTTCCTCTCCAGGTAGCTCTACCCCTTCTG | |
| | TSSTGSPGASPGTSSTGSPG | | GTGCAACCGGCTCTCCAGGTGCTTCTCCGGGCACCA | |
| | ASPGTSSTGSPGSSTPSGAT | | GCTCTACCGGTTCTCCAGGTACCCCGGGTAGCGGTA | |
| | GSPGSSTPSGATGSPGASP | | CCGCTTCTTCTTCTCCAGGTAGCTCTACTCCGTCTGG | |
| | GTSSTGSPGTPGSGTASSSP | | TGCTACCGGCTCTCCAGGTTCTAACCCTTCTGCATCC | |
| | GSSTPSGATGSPGSSTPSG | | ACCGGTACCGGCCCAGGTTCTAGCCCTTCTGCTTCCA | |
| | ATGSPGSSTPSGATGSPGS | | CCGGTACTGGCCCAGGTAGCTCTACCCCTTCTGGTGC | |
| | SPSASTGTGPGASPGTSST | | TACCGGCTCCCCAGGTAGCTCTACTCCTTCTGGTGCA | |
| | GSPGASPGTSSTGSPGTPG | | ACTGGCTCTCCAGGTGCATCTCCGGGCACTAGCTCTA | |
| | SGTASSSPGASPGTSSTGSP | | CTGGTTCTCCAGGTGCATCCCCTGGCACTAGCTCTAC | |
| | GASPGTSSTGSPGASPGTS | | TGGTTCTCCAGGTGCTTCTCCTGGTACCAGCTCTACT | |
| | STGSPGASPGTSSTGSPGTP | | GGTTCTCCAGGTACTCCTGGCAGCGGTACCGCTTCTT | |
| | GSGTASSSPGSSTPSGATG | | CTTCTCCAGGTGCTTCTCCTGGTACTAGCTCTACTGG | |
| | SPGTPGSGTASSSPGSSTPS | | TTCTCCAGGTGCTTCTCCGGGCACTAGCTCTACTGGT | |
| | GATGSPGTPGSGTASSSPG | | TCTCCAGGTGCTTCCCCGGGCACTAGCTCTACCGGTT | |
| | SSTPSGATGSPGSSTPSGAT | | CTCCAGGTTCTAGCCCTTCTGCATCTACTGGTACTGG | |
| | GSPGSSPSASTGTGPGSSPS | | CCCAGGTACTCCGGGCAGCGGTACTGCTTCTTCCTCT | |
| | ASTGTGPGASPGTSSTGSP | | CCAGGTGCATCTCCGGGCACTAGCTCTACTGGTTCTC | |
| | GTPGSGTASSSPGSSTPSG | | CAGGTGCATCCCCTGGCACTAGCTCTACTGGTTCTCC | |
| | ATGSPGSSPSASTGTGPGS | | AGGTGCTTCTCCTGGTACCAGCTCTACTGGTTCTCCA | |
| | SPSASTGTGPGASPGTSST | | GGTAGCTCTACTCCGTCTGGTGCAACCGGTTCCCCAG | |
| | GSPGASPGTSSTGSPGSSTP | | GTAGCTCTACTCCTTCTGGTGCTACTGGCTCCCCAGG | |
| | SGATGSPGSSPSASTGTGP | | TGCATCCCCTGGCACCAGCTCTACCGGTTCTCCAGGT | |
| | GASPGTSSTGSPGSSPSAST | | ACCCCGGGCAGCGGTACCGCATCTTCCTCTCCAGGT | |
| | GTGPGTPGSGTASSSPGSS | | AGCTCTACCCCGTCTGGTGCTACCGGTTCCCCAGGTA | |
| | TPSGATGSPGSSTPSGATG | | GCTCTACCCCGTCTGGTGCAACCGGCTCCCCAGGTA | |
| | SPGASPGTSSTGSP | | GCTCTACTCCGTCTGGTGCAACCGGCTCCCCAGGTTC | |
| | | | TAGCCCGTCTGCTTCCACTGGTACTGGCCCAGGTGCT | |
| | | | TCCCCGGGCACCAGCTCTACTGGTTCTCCAGGTGCAT | |
| | | | CCCCGGGTACCAGCTCTACCGGTTCTCCAGGTACTCC | |
| | | | TGGCAGCGGTACTGCATCTTCCTCTCCAGGTGCTTCT | |
| | | | CCGGGCACCAGCTCTACTGGTTCTCCAGGTGCATCTC | |
| | | | CGGGCACTAGCTCTACTGGTTCTCCAGGTGCATCCCC | |
| | | | TGGCACTAGCTCTACTGGTTCTCCAGGTGCTTCTCCT | |
| | | | GGTACCAGCTCTACTGGTTCTCCAGGTACCCCTGGTA | |
| | | | GCGGTACTGCTTCTTCCTCTCCAGGTAGCTCTACTCC | |
| | | | GTCTGGTGCTACCGGTTCTCCAGGTACCCCGGGTAG | |
| | | | CGGTACCGCATCTTCTTCTCCAGGTAGCTCTACCCCG | |
| | | | TCTGGTGCTACTGGTTCTCCAGGTACTCCGGGCAGCG | |
| | | | GTACTGCTTCTTCCTCTCCAGGTAGCTCTACCCCTTC | |
| | | | TGGTGCTACTGGCTCTCCAGGTAGCTCTACCCCGTCT | |
| | | | GGTGCTACTGGCTCCCCAGGTTCTAGCCCTTCTGCAT | |
| | | | CCACCGGTACCGGTCCAGGTTCTAGCCCGTCTGCATC | |
| | | | TACTGGTACTGGTCCAGGTGCATCCCCGGGCACTAG | |
| | | | CTCTACCGGTTCTCCAGGTACTCCTGGTAGCGGTACT | |
| | | | GCTTCTTCTTCTCCAGGTAGCTCTACTCCTTCTGGTG | |
| | | | CTACTGGTTCTCCAGGTTCTAGCCCTTCTGCATCCAC | |
| | | | CGGTACCGGCCCAGGTTCTAGCCCGTCTGCTTCTACC | |
| | | | GGTACTGGTCCAGGTGCTTCTCCGGGTACTAGCTCTA | |
| | | | CTGGTTCTCCAGGTGCATCTCCTGGTACTAGCTCTAC | |
| | | | TGGTTCTCCAGGTAGCTCTACTCCGTCTGGTGCAACC | |
| | | | GGCTCTCCAGGTTCTAGCCCTTCTGCATCTACCGGTA | |
| | | | CTGGTCCAGGTGCATCCCCTGGTACCAGCTCTACCG | |
| | | | GTTCTCCAGGTTCTAGCCCTTCTGCTTCTACCGGTAC | |
| | | | CGGTCCAGGTACCCCTGGCAGCGGTACCGCATCTTC | |
| | | | CTCTCCAGGTAGCTCTACTCCGTCTGGTGCAACCGGT | |
| | | | TCCCCAGGTAGCTCTACTCCTTCTGGTGCTACTGGCT | |
| | | | CCCCAGGTGCATCCCCTGGCACCAGCTCTACCGGTTC | |
| | | | TCCA | |
| hGH- | FPTIPLSRLFDNAMLRAHR | 725 | TTTCCGACTATTCCGCTGTCTCGTCTGTTTGATAATG | 726 |
| AM875 | LHQLAFDTYQEFEEAYIPK | | CTATGCTGCGTGCGCACCGTCTGCACCAGCTGGCCTT | |
| | EQKYSFLQNPQTSLCFSESI | | TGATACTTACCAGGAATTTGAAGAAGCcTACATTCCT | |
| | PTPSNREETQQKSNLELLRI | | AAAGAGCAGAAGTACTCTTTCCTGCAAAACCCACAG | |
| | SLLLIQSWLEPVQFLRSVF | | ACTTCTCTCTGCTTCAGCGAATCTATTCCGACGCCTT | |
| | ANSLVYGASDSNVYDLLK | | CCAATCGCGAGGAAACTCAGCAAAAGTCCAATCTGG | |
| | DLEEGIQTLMGRLEDGSPR | | AACTACTCCGCATTTCTCTGCTTCTGATTCAGAGCTG | |
| | TGQIFKQTYSKFDTNSHND | | GCTAGAACCAGTGCAATTTCTGCGTTCCGTCTTCGCC | |
| | DALLKNYGLLYCFRKDM | | AATAGCCTAGTTTATGGCGCATCCGACAGCAACGTA | |
| | DKVETFLRIVQCRSVEGSC | | TACGATCTCCTGAAAGATCTCGAGGAAGGCATTCAG | |
| | GFGGTSTEPSEGSAPGSEP | | ACCCTGATGGGTCGTCTCGAGGATGGCTCTCCGCGT | |
| | ATSGSETPGSPAGSPTSTEE | | ACTGGTCAGATCTTCAAGCAGACTTACTCTAAATTTG | |
| | GSTSSTAESPGPGTSTPESG | | ATACTAACAGCCACAATGACGATGCGCTTCTAAAAA | |
| | SASPGSTSESPSGTAPGSTS | | ACTATGGTCTGCTGTATTGTTTTCGTAAAGATATGGA | |
| | ESPSGTAPGTSTPESGSASP | | CAAAGTTGAAACCTTCCTGCGTATTGTTCAGTGTCGT | |
| | GTSTPESGSASPGSEPATSG | | TCCGTTGAGGGCAGCTGTGGTTTCTAAGGTGGTACTT | |
| | SETPGTSESATPESGPGSPA | | CTACTGAACCGTCTGAAGGCAGCGCACCAGGTAGCG | |
| | GSPTSTEEGTSTEPSEGSAP | | AACCGGCTACTTCCGGTTCTGAAACCCCAGGTAGCC | |
| | GTSESATPESGPGTSTEPSE | | CAGCAGGTTCTCCAACTTCTACTGAAGAAGGTTCTA | |
| | GSAPGTSTEPSEGSAPGSP | | CCAGCTCTACCGCAGAATCTCCTGGTCCAGGTACCTC | |
| | AGSPTSTEEGTSTEPSEGSA | | TACTCCGGAAAGCGGCTCTGCATCTCCAGGTTCTACT | |
| | PGTSTEPSEGSAPGTSESAT | | AGCGAATCTCCTTCTGGCACTGCACCAGGTTCTACTA | |
| | PESGPGTSESATPESGPGTS | | GCGAATCCCCGTCTGGTACTGCTCCAGGTACTTCTAC | |
| | TEPSEGSAPGTSTEPSEGSA | | TCCTGAAAGCGGTTCCGCTTCTCCAGGTACCTCTACT | |
| | PGTSESATPESGPGTSTEPS | | CCGGAAAGCGGTTCTGCATCTCCAGGTAGCGAACCG | |
| | EGSAPGSEPATSGSETPGSP | | GCAACCTCCGGCTCTGAAACCCCAGGTACCTCTGAA | |
| | AGSPTSTEEGSSTPSGATG | | AGCGCTACTCCTGAATCCGGCCCAGGTAGCCCGGCA | |
| | SPGTPGSGTASSSPGSSTPS | | GGTTCTCCGACTTCCACTGAGGAAGGTACCTCTACTG | |
| | GATGSPGTSTEPSEGSAPG | | AACCTTCTGAGGGCAGCGCTCCAGGTACTTCTGAAA | |
| | TSTEPSEGSAPGSEPATSGS | | GCGCTACCCCGGAGTCCGGTCCAGGTACTTCTACTG | |
| | ETPGSPAGSPTSTEEGSPA | | AACCGTCCGAAGGTAGCGCACCAGGTACTTCTACCG | |
| | GSPTSTEEGTSTEPSEGSAP | | AACCGTCCGAGGGTAGCGCACCAGGTAGCCCAGCAG | |
| | GASASGAPSTGGTSESATP | | GTTCTCCTACCTCCACCGAGGAAGGTACTTCTACCGA | |
| | ESGPGSPAGSPTSTEEGSPA | | ACCGTCCGAGGGTAGCGCACCAGGTACTTCTACCGA | |
| | GSPTSTEEGSTSSTAESPGP | | ACCTTCCGAGGGCAGCGCACCAGGTACTTCTGAAAG | |
| | GSTSESPSGTAPGTSPSGES | | CGCTACCCCTGAGTCCGGCCCAGGTACTTCTGAAAG | |
| | STAPGTPGSGTASSSPGSST | | CGCTACTCCTGAATCCGGTCCAGGTACCTCTACTGAA | |
| | PSGATGSPGSSPSASTGTG | | CCTTCCGAAGGCAGCGCTCCAGGTACCTCTACCGAA | |
| | PGSEPATSGSETPGTSESAT | | CCGTCCGAGGGCAGCGCACCAGGTACTTCTGAAAGC | |
| | PESGPGSEPATSGSETPGST | | GCAACCCCTGAATCCGGTCCAGGTACTTCTACTGAA | |
| | SSTAESPGPGSTSSTAESPG | | CCTTCCGAAGGTAGCGCTCCAGGTAGCGAACCTGCT | |
| | PGTSPSGESSTAPGSEPATS | | ACTTCTGGTTCTGAAACCCCAGGTAGCCCGGCTGGC | |
| | GSETPGSEPATSGSETPGTS | | TCTCCGACCTCCACCGAGGAAGGTAGCTCTACCCCG | |
| | TEPSEGSAPGSTSSTAESPG | | TCTGGTGCTACTGGTTCTCCAGGTACTCCGGGCAGCG | |
| | PGTSTPESGSASPGSTSESP | | GTACTGCTTCTTCCTCTCCAGGTAGCTCTACCCCTTC | |
| | SGTAPGTSTEPSEGSAPGT | | TGGTGCTACTGGCTCTCCAGGTACCTCTACCGAACCG | |
| | STEPSEGSAPGTSTEPSEGS | | TCCGAGGGTAGCGCACCAGGTACCTCTACTGAACCG | |
| | APGSSTPSGATGSPGSSPSA | | TCTGAGGGTAGCGCTCCAGGTAGCGAACCGGCAACC | |
| | STGTGPGASPGTSSTGSPG | | TCCGGTTCTGAAACTCCAGGTAGCCCTGCTGGCTCTC | |
| | SEPATSGSETPGTSESATPE | | CGACTTCTACTGAGGAAGGTAGCCCGGCTGGTTCTC | |
| | SGPGSPAGSPTSTEEGSSTP | | CGACTTCTACTGAGGAAGGTACTTCTACCGAACCTTC | |
| | SGATGSPGSSPSASTGTGP | | CGAAGGTAGCGCTCCAGGTGCAAGCGCAAGCGGCG | |
| | GASPGTSSTGSPGTSESATP | | CGCCAAGCACGGGAGGTACTTCTGAAAGCGCTACTC | |
| | ESGPGTSTEPSEGSAPGTST | | CTGAGTCCGGCCCAGGTAGCCCGGCTGGCTCTCCGA | |
| | EPSEGSAP | | CTTCCACCGAGGAAGGTAGCCCGGCTGGCTCTCCAA | |
| | | | CTTCTACTGAAGAAGGTTCTACCAGCTCTACCGCTGA | |
| | | | ATCTCCTGGCCCAGGTTCTACTAGCGAATCTCCGTCT | |
| | | | GGCACCGCACCAGGTACTTCCCCTAGCGGTGAATCT | |
| | | | TCTACTGCACCAGGTACCCCTGGCAGCGGTACCGCT | |
| | | | TCTTCCTCTCCAGGTAGCTCTACCCCGTCTGGTGCTA | |
| | | | CTGGCTCTCCAGGTTCTAGCCCGTCTGCATCTACCGG | |
| | | | TACCGGCCCAGGTAGCGAACCGGCAACCTCCGGCTC | |
| | | | TGAAACTCCAGGTACTTCTGAAAGCGCTACTCCGGA | |
| | | | ATCCGGCCCAGGTAGCGAACCGGCTACTTCCGGCTC | |
| | | | TGAAACCCCAGGTTCCACCAGCTCTACTGCAGAATC | |
| | | | TCCGGGCCCAGGTTCTACTAGCTCTACTGCAGAATCT | |
| | | | CCGGGTCCAGGTACTTCTCCTAGCGGCGAATCTTCTA | |
| | | | CCGCTCCAGGTAGCGAACCGGCAACCTCTGGCTCTG | |
| | | | AAACTCCAGGTAGCGAACCTGCAACCTCCGGCTCTG | |
| | | | AAACCCCAGGTACTTCTACTGAACCTTCTGAGGGCA | |
| | | | GCGCACCAGGTTCTACCAGCTCTACCGCAGAATCTC | |
| | | | CTGGTCCAGGTACCTCTACTCCGGAAAGCGGCTCTG | |
| | | | CATCTCCAGGTTCTACTAGCGAATCTCCTTCTGGCAC | |
| | | | TGCACCAGGTACTTCTACCGAACCGTCCGAAGGCAG | |
| | | | CGCTCCAGGTACCTCTACTGAACCTTCCGAGGGCAG | |
| | | | CGCTCCAGGTACCTCTACCGAACCTTCTGAAGGTAG | |
| | | | CGCACCAGGTAGCTCTACTCCGTCTGGTGCAACCGG | |
| | | | CTCCCCAGGTTCTAGCCCGTCTGCTTCCACTGGTACT | |
| | | | GGCCCAGGTGCTTCCCCGGGCACCAGCTCTACTGGT | |
| | | | TCTCCAGGTAGCGAACCTGCTACCTCCGGTTCTGAA | |
| | | | ACCCCAGGTACCTCTGAAAGCGCAACTCCGGAGTCT | |
| | | | GGTCCAGGTAGCCCTGCAGGTTCTCCTACCTCCACTG | |
| | | | AGGAAGGTAGCTCTACTCCGTCTGGTGCAACCGGCT | |
| | | | CCCCAGGTTCTAGCCCGTCTGCTTCCACTGGTACTGG | |
| | | | CCCAGGTGCTTCCCCGGGCACCAGCTCTACTGGTTCT | |
| | | | CCAGGTACCTCTGAAAGCGCTACTCCGGAGTCTGGC | |
| | | | CCAGGTACCTCTACTGAACCGTCTGAGGGTAGCGCT | |
| | | | CCAGGTACTTCTACTGAACCGTCCGAAGGTAGCGCA | |
| | | | CCA | |
| hGH- | FPTIPLSRLFDNAMLRAHR | 727 | TTTCCGACTATTCCGCTGTCTCGTCTGTTTGATAATG | 728 |
| AM1318 | LHQLAFDTYQEFEEAYIPK | | CTATGCTGCGTGCGCACCGTCTGCACCAGCTGGCCTT | |
| | EQKYSFLQNPQTSLCFSESI | | TGATACTTACCAGGAATTTGAAGAAGCcTACATTCCT | |
| | PTPSNREETQQKSNLELLRI | | AAAGAGCAGAAGTACTCTTTCCTGCAAAACCCACAG | |
| | SLLLIQSWLEPVQFLRSVF | | ACTTCTCTCTGCTTCAGCGAATCTATTCCGACGCCTT | |
| | ANSLVYGASDSNVYDLLK | | CCAATCGCGAGGAAACTCAGCAAAAGTCCAATCTGG | |
| | DLEEGIQTLMGRLEDGSPR | | AACTACTCCGCATTTCTCTGCTTCTGATTCAGAGCTG | |
| | TGQIFKQTYSKFDTNSHND | | GCTAGAACCAGTGCAATTTCTGCGTTCCGTCTTCGCC | |
| | DALLKNYGLLYCFRKDM | | AATAGCCTAGTTTATGGCGCATCCGACAGCAACGTA | |
| | DKVETFLRIVQCRSVEGSC | | TACGATCTCCTGAAAGATCTCGAGGAAGGCATTCAG | |
| | GFGGTSTEPSEGSAPGSEP | | ACCCTGATGGGTCGTCTCGAGGATGGCTCTCCGCGT | |
| | ATSGSETPGSPAGSPTSTEE | | ACTGGTCAGATCTTCAAGCAGACTTACTCTAAATTTG | |
| | GSTSSTAESPGPGTSTPESG | | ATACTAACAGCCACAATGACGATGCGCTTCTAAAAA | |
| | SASPGSTSESPSGTAPGSTS | | ACTATGGTCTGCTGTATTGTTTTCGTAAAGATATGGA | |
| | ESPSGTAPGTSTPESGSASP | | CAAAGTTGAAACCTTCCTGCGTATTGTTCAGTGTCGT | |
| | GTSTPESGSASPGSEPATSG | | TCCGTTGAGGGCAGCTGTGGTTTCTAAGGTGGTACTT | |
| | SETPGTSESATPESGPGSPA | | CTACTGAACCGTCTGAAGGCAGCGCACCAGGTAGCG | |
| | GSPTSTEEGTSTEPSEGSAP | | AACCGGCTACTTCCGGTTCTGAAACCCCAGGTAGCC | |
| | GTSESATPESGPGTSTEPSE | | CAGCAGGTTCTCCAACTTCTACTGAAGAAGGTTCTA | |
| | GSAPGTSTEPSEGSAPGSP | | CCAGCTCTACCGCAGAATCTCCTGGTCCAGGTACCTC | |
| | AGSPTSTEEGTSTEPSEGSA | | TACTCCGGAAAGCGGCTCTGCATCTCCAGGTTCTACT | |
| | PGTSTEPSEGSAPGTSESAT | | AGCGAATCTCCTTCTGGCACTGCACCAGGTTCTACTA | |
| | PESGPGTSESATPESGPGTS | | GCGAATCCCCGTCTGGTACTGCTCCAGGTACTTCTAC | |
| | TEPSEGSAPGTSTEPSEGSA | | TCCTGAAAGCGGTTCCGCTTCTCCAGGTACCTCTACT | |
| | PGTSESATPESGPGTSTEPS | | CCGGAAAGCGGTTCTGCATCTCCAGGTAGCGAACCG | |
| | EGSAPGSEPATSGSETPGSP | | GCAACCTCCGGCTCTGAAACCCCAGGTACCTCTGAA | |
| | AGSPTSTEEGSSTPSGATG | | AGCGCTACTCCTGAATCCGGCCCAGGTAGCCCGGCA | |
| | SPGTPGSGTASSSPGSSTPS | | GGTTCTCCGACTTCCACTGAGGAAGGTACCTCTACTG | |
| | GATGSPGTSTEPSEGSAPG | | AACCTTCTGAGGGCAGCGCTCCAGGTACTTCTGAAA | |
| | TSTEPSEGSAPGSEPATSGS | | GCGCTACCCCGGAGTCCGGTCCAGGTACTTCTACTG | |
| | ETPGSPAGSPTSTEEGSPA | | AACCGTCCGAAGGTAGCGCACCAGGTACTTCTACCG | |
| | GSPTSTEEGTSTEPSEGSAP | | AACCGTCCGAGGGTAGCGCACCAGGTAGCCCAGCAG | |
| | GPEPTGPAPSGGSEPATSG | | GTTCTCCTACCTCCACCGAGGAAGGTACTTCTACCGA | |
| | SETPGTSESATPESGPGSPA | | ACCGTCCGAGGGTAGCGCACCAGGTACTTCTACCGA | |
| | GSPTSTEEGTSESATPESGP | | ACCTTCCGAGGGCAGCGCACCAGGTACTTCTGAAAG | |
| | GSPAGSPTSTEEGSPAGSPT | | CGCTACCCCTGAGTCCGGCCCAGGTACTTCTGAAAG | |
| | STEEGTSESATPESGPGSPA | | CGCTACTCCTGAATCCGGTCCAGGTACCTCTACTGAA | |
| | GSPTSTEEGSPAGSPTSTEE | | CCTTCCGAAGGCAGCGCTCCAGGTACCTCTACCGAA | |
| | GSTSSTAESPGPGSTSESPS | | CCGTCCGAGGGCAGCGCACCAGGTACTTCTGAAAGC | |
| | GTAPGTSPSGESSTAPGSTS | | GCAACCCCTGAATCCGGTCCAGGTACTTCTACTGAA | |
| | ESPSGTAPGSTSESPSGTAP | | CCTTCCGAAGGTAGCGCTCCAGGTAGCGAACCTGCT | |
| | GTSPSGESSTAPGTSTEPSE | | ACTTCTGGTTCTGAAACCCCAGGTAGCCCGGCTGGC | |
| | GSAPGTSESATPESGPGTS | | TCTCCGACCTCCACCGAGGAAGGTAGCTCTACCCCG | |
| | ESATPESGPGSEPATSGSET | | TCTGGTGCTACTGGTTCTCCAGGTACTCCGGGCAGCG | |
| | PGTSESATPESGPGTSESAT | | GTACTGCTTCTTCCTCTCCAGGTAGCTCTACCCCTTC | |
| | PESGPGTSTEPSEGSAPGTS | | TGGTGCTACTGGCTCTCCAGGTACCTCTACCGAACCG | |
| | ESATPESGPGTSTEPSEGSA | | TCCGAGGGTAGCGCACCAGGTACCTCTACTGAACCG | |
| | PGTSPSGESSTAPGTSPSGE | | TCTGAGGGTAGCGCTCCAGGTAGCGAACCGGCAACC | |
| | SSTAPGTSPSGESSTAPGTS | | TCCGGTTCTGAAACTCCAGGTAGCCCTGCTGGCTCTC | |
| | TEPSEGSAPGSPAGSPTSTE | | CGACTTCTACTGAGGAAGGTAGCCCGGCTGGTTCTC | |
| | EGTSTEPSEGSAPGSSPSAS | | CGACTTCTACTGAGGAAGGTACTTCTACCGAACCTTC | |
| | TGTGPGSSTPSGATGSPGS | | CGAAGGTAGCGCTCCAGGTCCAGAACCAACGGGGCC | |
| | STPSGATGSPGSSTPSGAT | | GGCCCCAAGCGGAGGTAGCGAACCGGCAACCTCCG | |
| | GSPGSSTPSGATGSPGASP | | GCTCTGAAACCCCAGGTACCTCTGAAAGCGCTACTC | |
| | GTSSTGSPGASASGAPSTG | | CTGAATCCGGCCCAGGTAGCCCGGCAGGTTCTCCGA | |
| | GTSPSGESSTAPGSTSSTAE | | CTTCCACTGAGGAAGGTACTTCTGAAAGCGCTACTC | |
| | SPGPGTSPSGESSTAPGTSE | | CTGAGTCCGGCCCAGGTAGCCCGGCTGGCTCTCCGA | |
| | SATPESGPGTSTEPSEGSAP | | CTTCCACCGAGGAAGGTAGCCCGGCTGGCTCTCCAA | |
| | GTSTEPSEGSAPGSSPSAST | | CTTCTACTGAAGAAGGTACTTCTGAAAGCGCTACTC | |
| | GTGPGSSTPSGATGSPGAS | | CTGAGTCCGGCCCAGGTAGCCCGGCTGGCTCTCCGA | |
| | PGTSSTGSPGTSTPESGSAS | | CTTCCACCGAGGAAGGTAGCCCGGCTGGCTCTCCAA | |
| | PGTSPSGESSTAPGTSPSGE | | CTTCTACTGAAGAAGGTTCTACCAGCTCTACCGCTGA | |
| | SSTAPGTSESATPESGPGSE | | ATCTCCTGGCCCAGGTTCTACTAGCGAATCTCCGTCT | |
| | PATSGSETPGTSTEPSEGSA | | GGCACCGCACCAGGTACTTCCCCTAGCGGTGAATCT | |
| | PGSTSESPSGTAPGSTSESP | | TCTACTGCACCAGGTTCTACCAGCGAATCTCCTTCTG | |
| | SGTAPGTSTPESGSASPGSP | | GCACCGCTCCAGGTTCTACTAGCGAATCCCCGTCTG | |
| | AGSPTSTEEGTSESATPESG | | GTACCGCACCAGGTACTTCTCCTAGCGGCGAATCTTC | |
| | PGTSTEPSEGSAPGSPAGSP | | TACCGCACCAGGTACTTCTACCGAACCTTCCGAGGG | |
| | TSTEEGTSESATPESGPGSE | | CAGCGCACCAGGTACTTCTGAAAGCGCTACCCCTGA | |
| | PATSGSETPGSSTPSGATGS | | GTCCGGCCCAGGTACTTCTGAAAGCGCTACTCCTGA | |
| | PGASPGTSSTGSPGSSTPSG | | ATCCGGTCCAGGTAGCGAACCGGCAACCTCTGGCTC | |
| | ATGSPGSTSESPSGTAPGTS | | TGAAACCCCAGGTACCTCTGAAAGCGCTACTCCGGA | |
| | PSGESSTAPGSTSSTAESPG | | ATCTGGTCCAGGTACTTCTGAAAGCGCTACTCCGGA | |
| | PGSSTPSGATGSPGASPGT | | ATCCGGTCCAGGTACCTCTACTGAACCTTCTGAGGG | |
| | SSTGSPGTPGSGTASSSPGS | | CAGCGCTCCAGGTACTTCTGAAAGCGCTACCCCGGA | |
| | PAGSPTSTEEGSPAGSPTST | | GTCCGGTCCAGGTACTTCTACTGAACCGTCCGAAGG | |
| | EEGTSTEPSEGSAP | | TAGCGCACCAGGTACCTCCCCTAGCGGCGAATCTTC | |
| | | | TACTGCTCCAGGTACCTCTCCTAGCGGCGAATCTTCT | |
| | | | ACCGCTCCAGGTACCTCCCCTAGCGGTGAATCTTCTA | |
| | | | CCGCACCAGGTACTTCTACCGAACCGTCCGAGGGTA | |
| | | | GCGCACCAGGTAGCCCAGCAGGTTCTCCTACCTCCA | |
| | | | CCGAGGAAGGTACTTCTACCGAACCGTCCGAGGGTA | |
| | | | GCGCACCAGGTTCTAGCCCTTCTGCTTCCACCGGTAC | |
| | | | CGGCCCAGGTAGCTCTACTCCGTCTGGTGCAACTGG | |
| | | | CTCTCCAGGTAGCTCTACTCCGTCTGGTGCAACCGGC | |
| | | | TCCCCAGGTAGCTCTACCCCGTCTGGTGCTACCGGCT | |
| | | | CTCCAGGTAGCTCTACCCCGTCTGGTGCAACCGGCTC | |
| | | | CCCAGGTGCATCCCCGGGTACTAGCTCTACCGGTTCT | |
| | | | CCAGGTGCAAGCGCAAGCGGCGCGCCAAGCACGGG | |
| | | | AGGTACTTCTCCGAGCGGTGAATCTTCTACCGCACC | |
| | | | AGGTTCTACTAGCTCTACCGCTGAATCTCCGGGCCCA | |
| | | | GGTACTTCTCCGAGCGGTGAATCTTCTACTGCTCCAG | |
| | | | GTACCTCTGAAAGCGCTACTCCGGAGTCTGGCCCAG | |
| | | | GTACCTCTACTGAACCGTCTGAGGGTAGCGCTCCAG | |
| | | | GTACTTCTACTGAACCGTCCGAAGGTAGCGCACCAG | |
| | | | GTTCTAGCCCTTCTGCATCTACTGGTACTGGCCCAGG | |
| | | | TAGCTCTACTCCTTCTGGTGCTACCGGCTCTCCAGGT | |
| | | | GCTTCTCCGGGTACTAGCTCTACCGGTTCTCCAGGTA | |
| | | | CTTCTACTCCGGAAAGCGGTTCCGCATCTCCAGGTAC | |
| | | | TTCTCCTAGCGGTGAATCTTCTACTGCTCCAGGTACC | |
| | | | TCTCCTAGCGGCGAATCTTCTACTGCTCCAGGTACTT | |
| | | | CTGAAAGCGCAACCCCTGAATCCGGTCCAGGTAGCG | |
| | | | AACCGGCTACTTCTGGCTCTGAGACTCCAGGTACTTC | |
| | | | TACCGAACCGTCCGAAGGTAGCGCACCAGGTTCTAC | |
| | | | CAGCGAATCCCCTTCTGGTACTGCTCCAGGTTCTACC | |
| | | | AGCGAATCCCCTTCTGGCACCGCACCAGGTACTTCT | |
| | | | ACCCCTGAAAGCGGCTCCGCTTCTCCAGGTAGCCCG | |
| | | | GCAGGCTCTCCGACCTCTACTGAGGAAGGTACTTCT | |
| | | | GAAAGCGCAACCCCGGAGTCCGGCCCAGGTACCTCT | |
| | | | ACCGAACCGTCTGAGGGCAGCGCACCAGGTAGCCCT | |
| | | | GCTGGCTCTCCAACCTCCACCGAAGAAGGTACCTCT | |
| | | | GAAAGCGCAACCCCTGAATCCGGCCCAGGTAGCGAA | |
| | | | CCGGCAACCTCCGGTTCTGAAACCCCAGGTAGCTCT | |
| | | | ACCCCGTCTGGTGCTACCGGTTCCCCAGGTGCTTCTC | |
| | | | CTGGTACTAGCTCTACCGGTTCTCCAGGTAGCTCTAC | |
| | | | CCCGTCTGGTGCTACTGGCTCTCCAGGTTCTACTAGC | |
| | | | GAATCCCCGTCTGGTACTGCTCCAGGTACTTCCCCTA | |
| | | | GCGGTGAATCTTCTACTGCTCCAGGTTCTACCAGCTC | |
| | | | TACCGCAGAATCTCCGGGTCCAGGTAGCTCTACCCC | |
| | | | TTCTGGTGCAACCGGCTCTCCAGGTGCATCCCCGGGT | |
| | | | ACCAGCTCTACCGGTTCTCCAGGTACTCCGGGTAGC | |
| | | | GGTACCGCTTCTTCCTCTCCAGGTAGCCCTGCTGGCT | |
| | | | CTCCGACTTCTACTGAGGAAGGTAGCCCGGCTGGTT | |
| | | | CTCCGACTTCTACTGAGGAAGGTACTTCTACCGAAC | |
| | | | CTTCCGAAGGTAGCGCTCCA | |

*Sequence name reflects N- to C-terminus configuration of the growth factor and XTEN components

TABLE 36
Exemplary GHXTEN comprising growth hormones and two XTEN sequences

| GHXTEN | | | | |
|---|---|---|---|---|
| Name* | Amino Acid Sequence | SEQ ID NO: | DNA Nucleotide Sequence | SEQ ID NO: |
| AE48- | MAEPAGSPTSTEEGT | 729 | ATGGCTGAACCTGCTGGCTCTCCAAC | 730 |
| hGH- | PGSGTASSSPGSSTPS | | CTCCACTGAGGAAGGTACCCCGGGTA | |
| AE144 | GATGSPGASPGTSST | | GCGGTACTGCTTCTTCCTCTCCAGGTA | |
| | GSPGFPTIPLSRLFDN | | GCTCTACCCCTTCTGGTGCAACCGGCT | |
| | AMLRAHRLHQLAFD | | CTCCAGGTGCTTCTCCGGGCACCAGCT | |
| | TYQEFEEAYIPKEQK | | CTACCGGTTCTCCAGGTTTTCCGACTA | |
| | YSFLQNPQTSLCFSE | | TTCCGCTGTCTCGTCTGTTTGATAATG | |
| | SIPTPSNREETQQKS | | CTATGCTGCGTGCGCACCGTCTGCACC | |
| | NLELLRISLLLIQSWL | | AGCTGGCCTTTGATACTTACCAGGAA | |
| | EPVQFLRSVFANSLV | | TTTGAAGAAGCcTACATTCCTAAAGAG | |
| | YGASDSNVYDLLKD | | CAGAAGTACTCTTTCCTGCAAAACCC | |
| | LEEGIQTLMGRLEDG | | ACAGACTTCTCTCTGCTTCAGCGAATC | |
| | SPRTGQIFKQTYSKF | | TATTCCGACGCCTTCCAATCGCGAGG | |
| | DTNSHNDDALLKNY | | AAACTCAGCAAAAGTCCAATCTGGAA | |
| | GLLYCFRKDMDKVE | | CTACTCCGCATTTCTCTGCTTCTGATT | |
| | TFLRIVQCRSVEGSC | | CAGAGCTGGCTAGAACCAGTGCAATT | |
| | GFGGSEPATSGSETP | | TCTGCGTTCCGTCTTCGCCAATAGCCT | |
| | GTSESATPESGPGSE | | AGTTTATGGCGCATCCGACAGCAACG | |
| | PATSGSETPGSPAGS | | TATACGATCTCCTGAAAGATCTCGAG | |
| | PTSTEEGTSTEPSEGS | | GAAGGCATTCAGACCCTGATGGGTCG | |
| | APGSEPATSGSETPG | | TCTCGAGGATGGCTCTCCGCGTACTG | |
| | SEPATSGSETPGSEP | | GTCAGATCTTCAAGCAGACTTACTCTA | |
| | ATSGSETPGTSTEPSE | | AATTTGATACTAACAGCCACAATGAC | |
| | GSAPGTSESATPESG | | GATGCGCTTCTAAAAAACTATGGTCT | |
| | PGSEPATSGSETPGT | | GCTGTATTGTTTTCGTAAAGATATGGA | |
| | STEPSEGSAP | | CAAAGTTGAAACCTTCCTGCGTATTGT | |
| | | | TCAGTGTCGTTCCGTTGAGGGCAGCT | |
| | | | GTGGTTTCTAAGGTGGTAGCGAACCG | |
| | | | GCAACTTCCGGCTCTGAAACCCCAGG | |
| | | | TACTTCTGAAAGCGCTACTCCTGAGTC | |
| | | | TGGCCCAGGTAGCGAACCTGCTACCT | |
| | | | CTGGCTCTGAAACCCCAGGTAGCCCG | |
| | | | GCAGGCTCTCCGACTTCCACCGAGGA | |
| | | | AGGTACCTCTACTGAACCTTCTGAGG | |
| | | | GTAGCGCTCCAGGTAGCGAACCGGCA | |
| | | | ACCTCTGGCTCTGAAACCCCAGGTAG | |
| | | | CGAACCTGCTACCTCCGGCTCTGAAA | |
| | | | CTCCAGGTAGCGAACCGGCTACTTCC | |
| | | | GGTTCTGAAACTCCAGGTACCTCTACC | |
| | | | GAACCTTCCGAAGGCAGCGCACCAGG | |
| | | | TACTTCTGAAAGCGCAACCCCTGAAT | |
| | | | CCGGTCCAGGTAGCGAACCGGCTACT | |
| | | | TCTGGCTCTGAGACTCCAGGTACTTCT | |
| | | | ACCGAACCGTCCGAAGGTAGCGCACCA | |
| AM48- | MAEPAGSPTSTEEGA | 731 | ATGGCTGAACCTGCTGGCTCTCCAAC | 732 |
| hGH- | SPGTSSTGSPGSSTPS | | CTCCACTGAGGAAGGTGCATCCCCGG | |
| AE144 | GATGSPGSSTPSGAT | | GCACCAGCTCTACCGGTTCTCCAGGT | |
| | GSPGFPTIPLSRLFDN | | AGCTCTACCCCGTCTGGTGCTACCGGC | |
| | AMLRAHRLHQLAFD | | TCTCCAGGTAGCTCTACCCCGTCTGGT | |
| | TYQEFEEAYIPKEQK | | GCTACTGGCTCTCCAGGTTTTCCGACT | |
| | YSFLQNPQTSLCFSE | | ATTCCGCTGTCTCGTCTGTTTGATAAT | |
| | SIPTPSNREETQQKS | | GCTATGCTGCGTGCGCACCGTCTGCA | |
| | NLELLRISLLLIQSWL | | CCAGCTGGCCTTTGATACTTACCAGG | |
| | EPVQFLRSVFANSLV | | AATTTGAAGAAGCcTACATTCCTAAAG | |
| | YGASDSNVYDLLKD | | AGCAGAAGTACTCTTTCCTGCAAAAC | |
| | LEEGIQTLMGRLEDG | | CCACAGACTTCTCTCTGCTTCAGCGAA | |
| | SPRTGQIFKQTYSKF | | TCTATTCCGACGCCTTCCAATCGCGAG | |
| | DTNSHNDDALLKNY | | GAAACTCAGCAAAAGTCCAATCTGGA | |
| | GLLYCFRKDMDKVE | | ACTACTCCGCATTTCTCTGCTTCTGAT | |
| | TFLRIVQCRSVEGSC | | TCAGAGCTGGCTAGAACCAGTGCAAT | |
| | GFGGSEPATSGSETP | | TTCTGCGTTCCGTCTTCGCCAATAGCC | |
| | GTSESATPESGPGSE | | TAGTTTATGGCGCATCCGACAGCAAC | |
| | PATSGSETPGSPAGS | | GTATACGATCTCCTGAAAGATCTCGA | |
| | PTSTEEGTSTEPSEGS | | GGAAGGCATTCAGACCCTGATGGGTC | |
| | APGSEPATSGSETPG | | GTCTCGAGGATGGCTCTCCGCGTACT | |
| | SEPATSGSETPGSEP | | GGTCAGATCTTCAAGCAGACTTACTCT | |
| | ATSGSETPGTSTEPSE | | AAATTTGATACTAACAGCCACAATGA | |
| | GSAPGTSESATPESG | | CGATGCGCTTCTAAAAAACTATGGTC | |
| | PGSEPATSGSETPGT | | TGCTGTATTGTTTTCGTAAAGATATGG | |
| | STEPSEGSAP | | ACAAAGTTGAAACCTTCCTGCGTATT | |
| | | | GTTCAGTGTCGTTCCGTTGAGGGCAG | |
| | | | CTGTGGTTTCTAAGGTGGTAGCGAAC | |
| | | | CGGCAACTTCCGGCTCTGAAACCCCA | |
| | | | GGTACTTCTGAAAGCGCTACTCCTGA | |
| | | | GTCTGGCCCAGGTAGCGAACCTGCTA | |
| | | | CCTCTGGCTCTGAAACCCCAGGTAGC | |
| | | | CCGGCAGGCTCTCCGACTTCCACCGA | |
| | | | GGAAGGTACCTCTACTGAACCTTCTG | |
| | | | AGGGTAGCGCTCCAGGTAGCGAACCG | |
| | | | GCAACCTCTGGCTCTGAAACCCCAGG | |
| | | | TAGCGAACCTGCTACCTCCGGCTCTG | |
| | | | AAACTCCAGGTAGCGAACCGGCTACT | |
| | | | TCCGGTTCTGAAACTCCAGGTACCTCT | |
| | | | ACCGAACCTTCCGAAGGCAGCGCACC | |
| | | | AGGTACTTCTGAAAGCGCAACCCCTG | |
| | | | AATCCGGTCCAGGTAGCGAACCGGCT | |
| | | | ACTTCTGGCTCTGAGACTCCAGGTACT | |
| | | | TCTACCGAACCGTCCGAAGGTAGCGC | |
| | | | ACCA | |
| AE144- | GSEPATSGSETPGTS | 733 | GGTAGCGAACCGGCAACTTCCGGCTC | 734 |
| hGH- | ESATPESGPGSEPAT | | TGAAACCCCAGGTACTTCTGAAAGCG | |
| AE144 | SGSETPGSPAGSPTST | | CTACTCCTGAGTCTGGCCCAGGTAGC | |
| | EEGTSTEPSEGSAPG | | GAACCTGCTACCTCTGGCTCTGAAAC | |
| | SEPATSGSETPGSEP | | CCCAGGTAGCCCGGCAGGCTCTCCGA | |
| | ATSGSETPGSEPATS | | CTTCCACCGAGGAAGGTACCTCTACT | |
| | GSETPGTSTEPSEGS | | GAACCTTCTGAGGGTAGCGCTCCAGG | |
| | APGTSESATPESGPG | | TAGCGAACCGGCAACCTCTGGCTCTG | |
| | SEPATSGSETPGTSTE | | AAACCCCAGGTAGCGAACCTGCTACC | |
| | PSEGSAPGFPTIPLSR | | TCCGGCTCTGAAACTCCAGGTAGCGA | |
| | LFDNAMLRAHRLHQ | | ACCGGCTACTTCCGGTTCTGAAACTCC | |
| | LAFDTYQEFEEAYIP | | AGGTACCTCTACCGAACCTTCCGAAG | |
| | KEQKYSFLQNPQTSL | | GCAGCGCACCAGGTACTTCTGAAAGC | |
| | CFSESIPTPSNREETQ | | GCAACCCCTGAATCCGGTCCAGGTAG | |
| | QKSNLELLRISLLLIQ | | CGAACCGGCTACTTCTGGCTCTGAGA | |
| | SWLEPVQFLRSVFA | | CTCCAGGTACTTCTACCGAACCGTCCG | |
| | NSLVYGASDSNVYD | | AAGGTAGCGCACCAGGTTTTCCGACT | |
| | LLKDLEEGIQTLMGR | | ATTCCGCTGTCTCGTCTGTTTGATAAT | |
| | LEDGSPRTGQIFKQT | | GCTATGCTGCGTGCGCACCGTCTGCA | |
| | YSKFDTNSHNDDAL | | CCAGCTGGCCTTTGATACTTACCAGG | |
| | LKNYGLLYCFRKDM | | AATTTGAAGAAGCcTACATTCCTAAAG | |
| | DKVETFLRIVQCRSV | | AGCAGAAGTACTCTTTCCTGCAAAAC | |
| | EGSCGFGGSEPATSG | | CCACAGACTTCTCTCTGCTTCAGCGAA | |
| | SETPGTSESATPESGP | | TCTATTCCGACGCCTTCCAATCGCGAG | |
| | GSEPATSGSETPGSP | | GAAACTCAGCAAAAGTCCAATCTGGA | |
| | AGSPTSTEEGTSTEPS | | ACTACTCCGCATTTCTCTGCTTCTGAT | |
| | EGSAPGSEPATSGSE | | TCAGAGCTGGCTAGAACCAGTGCAAT | |
| | TPGSEPATSGSETPG | | TTCTGCGTTCCGTCTTCGCCAATAGCC | |
| | SEPATSGSETPGTSTE | | TAGTTTATGGCGCATCCGACAGCAAC | |
| | PSEGSAPGTSESATP | | GTATACGATCTCCTGAAAGATCTCGA | |
| | ESGPGSEPATSGSET | | GGAAGGCATTCAGACCCTGATGGGTC | |
| | PGTSTEPSEGSAP | | GTCTCGAGGATGGCTCTCCGCGTACT | |
| | | | GGTCAGATCTTCAAGCAGACTTACTCT | |
| | | | AAATTTGATACTAACAGCCACAATGA | |
| | | | CGATGCGCTTCTAAAAAACTATGGTC | |
| | | | TGCTGTATTGTTTTCGTAAAGATATGG | |
| | | | ACAAAGTTGAAACCTTCCTGCGTATT | |
| | | | GTTCAGTGTCGTTCCGTTGAGGGCAG | |
| | | | CTGTGGTTTCTAAGGTGGTAGCGAAC | |
| | | | CGGCAACTTCCGGCTCTGAAACCCCA | |
| | | | GGTACTTCTGAAAGCGCTACTCCTGA | |
| | | | GTCTGGCCCAGGTAGCGAACCTGCTA | |
| | | | CCTCTGGCTCTGAAACCCCAGGTAGC | |
| | | | CCGGCAGGCTCTCCGACTTCCACCGA | |
| | | | GGAAGGTACCTCTACTGAACCTTCTG | |
| | | | AGGGTAGCGCTCCAGGTAGCGAACCG | |
| | | | GCAACCTCTGGCTCTGAAACCCCAGG | |
| | | | TAGCGAACCTGCTACCTCCGGCTCTG | |
| | | | AAACTCCAGGTAGCGAACCGGCTACT | |
| | | | TCCGGTTCTGAAACTCCAGGTACCTCT | |
| | | | ACCGAACCTTCCGAAGGCAGCGCACC | |
| | | | AGGTACTTCTGAAAGCGCAACCCCTG | |
| | | | AATCCGGTCCAGGTAGCGAACCGGCT | |
| | | | ACTTCTGGCTCTGAGACTCCAGGTACT | |
| | | | TCTACCGAACCGTCCGAAGGTAGCGC | |
| | | | ACCA | |
| AE288- | GTSESATPESGPGSE | 735 | GGTACCTCTGAAAGCGCAACTCCTGA | 736 |
| hGH- | PATSGSETPGTSESA | | GTCTGGCCCAGGTAGCGAACCTGCTA | |
| AE144 | TPESGPGSEPATSGS | | CCTCCGGCTCTGAGACTCCAGGTACCT | |
| | ETPGTSESATPESGP | | CTGAAAGCGCAACCCCGGAATCTGGT | |
| | GTSTEPSEGSAPGSP | | CCAGGTAGCGAACCTGCAACCTCTGG | |
| | AGSPTSTEEGTSESA | | CTCTGAAACCCCAGGTACCTCTGAAA | |
| | TPESGPGSEPATSGS | | GCGCTACTCCTGAATCTGGCCCAGGT | |
| | ETPGTSESATPESGP | | ACTTCTACTGAACCGTCCGAGGGCAG | |
| | GSPAGSPTSTEEGSP | | CGCACCAGGTAGCCCTGCTGGCTCTC | |
| | AGSPTSTEEGTSTEPS | | CAACCTCCACCGAAGAAGGTACCTCT | |
| | EGSAPGTSESATPES | | GAAAGCGCAACCCCTGAATCCGGCCC | |
| | GPGTSESATPESGPG | | AGGTAGCGAACCGGCAACCTCCGGTT | |
| | TSESATPESGPGSEP | | CTGAAACCCCAGGTACTTCTGAAAGC | |
| | ATSGSETPGSEPATS | | GCTACTCCTGAGTCCGGCCCAGGTAG | |
| | GSETPGSPAGSPTST | | CCCGGCTGGCTCTCCGACTTCCACCGA | |
| | EEGTSTEPSEGSAPG | | GGAAGGTAGCCCGGCTGGCTCTCCAA | |
| | TSTEPSEGSAPGSEP | | CTTCTACTGAAGAAGGTACTTCTACCG | |
| | ATSGSETPGTSESAT | | AACCTTCCGAGGGCAGCGCACCAGGT | |
| | PESGPGTSTEPSEGS | | ACTTCTGAAAGCGCTACCCCTGAGTC | |
| | APGFPTIPLSRLFDNA | | CGGCCCAGGTACTTCTGAAAGCGCTA | |
| | MLRAHRLHQLAFDT | | CTCCTGAATCCGGTCCAGGTACTTCTG | |
| | YQEFEEAYIPKEQKY | | AAAGCGCTACCCCGGAATCTGGCCCA | |
| | SFLQNPQTSLCFSESI | | GGTAGCGAACCGGCTACTTCTGGTTCT | |
| | PTPSNREETQQKSNL | | GAAACCCCAGGTAGCGAACCGGCTAC | |
| | ELLRISLLLIQSWLEP | | CTCCGGTTCTGAAACTCCAGGTAGCC | |
| | VQFLRSVFANSLVY | | CAGCAGGCTCTCCGACTTCCACTGAG | |
| | GASDSNVYDLLKDL | | GAAGGTACTTCTACTGAACCTTCCGA | |
| | EEGIQTLMGRLEDGS | | AGGCAGCGCACCAGGTACCTCTACTG | |
| | PRTGQIFKQTYSKFD | | AACCTTCTGAGGGCAGCGCTCCAGGT | |
| | TNSHNDDALLKNYG | | AGCGAACCTGCAACCTCTGGCTCTGA | |
| | LLYCFRKDMDKVET | | AACCCCAGGTACCTCTGAAAGCGCTA | |
| | FLRIVQCRSVEGSCG | | CTCCTGAATCTGGCCCAGGTACTTCTA | |
| | FGGSEPATSGSETPG | | CTGAACCGTCCGAGGGCAGCGCACCA | |
| | TSESATPESGPGSEP | | GGTTTTCCGACTATTCCGCTGTCTCGT | |
| | ATSGSETPGSPAGSP | | CTGTTTGATAATGCTATGCTGCGTGCG | |
| | TSTEEGTSTEPSEGS | | CACCGTCTGCACCAGCTGGCCTTTGAT | |
| | APGSEPATSGSETPG | | ACTTACCAGGAATTTGAAGAAGCcTA | |
| | SEPATSGSETPGSEP | | CATTCCTAAAGAGCAGAAGTACTCTT | |
| | ATSGSETPGTSTEPSE | | TCCTGCAAAACCCACAGACTTCTCTCT | |
| | GSAPGTSESATPESG | | GCTTCAGCGAATCTATTCCGACGCCTT | |
| | PGSEPATSGSETPGT | | CCAATCGCGAGGAAACTCAGCAAAAG | |
| | STEPSEGSAP | | TCCAATCTGGAACTACTCCGCATTTCT | |
| | | | CTGCTTCTGATTCAGAGCTGGCTAGA | |
| | | | ACCAGTGCAATTTCTGCGTTCCGTCTT | |
| | | | CGCCAATAGCCTAGTTTATGGCGCAT | |
| | | | CCGACAGCAACGTATACGATCTCCTG | |
| | | | AAAGATCTCGAGGAAGGCATTCAGAC | |
| | | | CCTGATGGGTCGTCTCGAGGATGGCT | |
| | | | CTCCGCGTACTGGTCAGATCTTCAAGC | |
| | | | AGACTTACTCTAAATTTGATACTAACA | |
| | | | GCCACAATGACGATGCGCTTCTAAAA | |
| | | | AACTATGGTCTGCTGTATTGTTTTCGT | |
| | | | AAAGATATGGACAAAGTTGAAACCTT | |
| | | | CCTGCGTATTGTTCAGTGTCGTTCCGT | |
| | | | TGAGGGCAGCTGTGGTTTCTAAGGTG | |
| | | | GTAGCGAACCGGCAACTTCCGGCTCT | |
| | | | GAAACCCCAGGTACTTCTGAAAGCGC | |
| | | | TACTCCTGAGTCTGGCCCAGGTAGCG | |
| | | | AACCTGCTACCTCTGGCTCTGAAACCC | |
| | | | CAGGTAGCCCGGCAGGCTCTCCGACT | |
| | | | TCCACCGAGGAAGGTACCTCTACTGA | |
| | | | ACCTTCTGAGGGTAGCGCTCCAGGTA | |
| | | | GCGAACCGGCAACCTCTGGCTCTGAA | |
| | | | ACCCCAGGTAGCGAACCTGCTACCTC | |
| | | | CGGCTCTGAAACTCCAGGTAGCGAAC | |
| | | | CGGCTACTTCCGGTTCTGAAACTCCAG | |
| | | | GTACCTCTACCGAACCTTCCGAAGGC | |
| | | | AGCGCACCAGGTACTTCTGAAAGCGC | |
| | | | AACCCCTGAATCCGGTCCAGGTAGCG | |
| | | | AACCGGCTACTTCTGGCTCTGAGACTC | |
| | | | CAGGTACTTCTACCGAACCGTCCGAA | |
| | | | GGTAGCGCACCA | |
| AF144- | GTSTPESGSASPGTSP | 737 | GGTACTTCTACTCCGGAAAGCGGTTC | 738 |
| hGH- | SGESSTAPGTSPSGES | | CGCATCTCCAGGTACTTCTCCTAGCGG | |
| AE144 | STAPGSTSSTAESPGP | | TGAATCTTCTACTGCTCCAGGTACCTC | |
| | GSTSESPSGTAPGSTS | | TCCTAGCGGCGAATCTTCTACTGCTCC | |
| | STAESPGPGTSPSGES | | AGGTTCTACCAGCTCTACCGCTGAATC | |
| | STAPGTSTPESGSASP | | TCCTGGCCCAGGTTCTACCAGCGAAT | |
| | GSTSSTAESPGPGTSP | | CCCCGTCTGGCACCGCACCAGGTTCT | |
| | SGESSTAPGTSPSGES | | ACTAGCTCTACCGCAGAATCTCCGGG | |
| | STAPGTSPSGESSTAP | | TCCAGGTACTTCCCCTAGCGGTGAATC | |
| | GFPTIPLSRLFDNAM | | TTCTACTGCTCCAGGTACCTCTACTCC | |
| | LRAHRLHQLAFDTY | | GGAAAGCGGCTCCGCATCTCCAGGTT | |
| | QEFEEAYIPKEQKYS | | CTACTAGCTCTACTGCTGAATCTCCTG | |
| | FLQNPQTSLCFSESIP | | GTCCAGGTACCTCCCCTAGCGGCGAA | |
| | TPSNREETQQKSNLE | | TCTTCTACTGCTCCAGGTACCTCTCCT | |
| | LLRISLLLIQSWLEPV | | AGCGGCGAATCTTCTACCGCTCCAGG | |
| | QFLRSVFANSLVYG | | TACCTCCCCTAGCGGTGAATCTTCTAC | |
| | ASDSNVYDLLKDLE | | CGCACCAGGTTTTCCGACTATTCCGCT | |
| | EGIQTLMGRLEDGSP | | GTCTCGTCTGTTTGATAATGCTATGCT | |
| | RTGQIFKQTYSKFDT | | GCGTGCGCACCGTCTGCACCAGCTGG | |
| | NSHNDDALLKNYGL | | CCTTTGATACTTACCAGGAATTTGAAG | |
| | LYCFRKDMDKVETF | | AAGCcTACATTCCTAAAGAGCAGAAG | |
| | LRIVQCRSVEGSCGF | | TACTCTTTCCTGCAAAACCCACAGACT | |
| | GGSEPATSGSETPGT | | TCTCTCTGCTTCAGCGAATCTATTCCG | |
| | SESATPESGPGSEPA | | ACGCCTTCCAATCGCGAGGAAACTCA | |
| | TSGSETPGSPAGSPTS | | GCAAAAGTCCAATCTGGAACTACTCC | |
| | TEEGTSTEPSEGSAP | | GCATTTCTCTGCTTCTGATTCAGAGCT | |
| | GSEPATSGSETPGSE | | GGCTAGAACCAGTGCAATTTCTGCGT | |
| | PATSGSETPGSEPAT | | TCCGTCTTCGCCAATAGCCTAGTTTAT | |
| | SGSETPGTSTEPSEGS | | GGCGCATCCGACAGCAACGTATACGA | |
| | APGTSESATPESGPG | | TCTCCTGAAAGATCTCGAGGAAGGCA | |
| | SEPATSGSETPGTSTE | | TTCAGACCCTGATGGGTCGTCTCGAG | |
| | PSEGSAP | | GATGGCTCTCCGCGTACTGGTCAGAT | |
| | | | CTTCAAGCAGACTTACTCTAAATTTGA | |
| | | | TACTAACAGCCACAATGACGATGCGC | |
| | | | TTCTAAAAAACTATGGTCTGCTGTATT | |
| | | | GTTTTCGTAAAGATATGGACAAAGTT | |
| | | | GAAACCTTCCTGCGTATTGTTCAGTGT | |
| | | | CGTTCCGTTGAGGGCAGCTGTGGTTTC | |
| | | | TAAGGTGGTAGCGAACCGGCAACTTC | |
| | | | CGGCTCTGAAACCCCAGGTACTTCTG | |
| | | | AAAGCGCTACTCCTGAGTCTGGCCCA | |
| | | | GGTAGCGAACCTGCTACCTCTGGCTCT | |
| | | | GAAACCCCAGGTAGCCCGGCAGGCTC | |
| | | | TCCGACTTCCACCGAGGAAGGTACCT | |
| | | | CTACTGAACCTTCTGAGGGTAGCGCT | |
| | | | CCAGGTAGCGAACCGGCAACCTCTGG | |
| | | | CTCTGAAACCCCAGGTAGCGAACCTG | |
| | | | CTACCTCCGGCTCTGAAACTCCAGGT | |
| | | | AGCGAACCGGCTACTTCCGGTTCTGA | |
| | | | AACTCCAGGTACCTCTACCGAACCTTC | |
| | | | CGAAGGCAGCGCACCAGGTACTTCTG | |
| | | | AAAGCGCAACCCCTGAATCCGGTCCA | |
| | | | GGTAGCGAACCGGCTACTTCTGGCTC | |
| | | | TGAGACTCCAGGTACTTCTACCGAAC | |
| | | | CGTCCGAAGGTAGCGCACCA | |
| AD576- | GSSESGSSEGGPGSG | 739 | GGTTCCTCTGAAAGCGGTTCTTCCGAA | 740 |
| hGH- | GEPSESGSSGSSESGS | | GGTGGTCCAGGTTCCTCTGAAAGCGG | |
| AE144 | SEGGPGSSESGSSEG | | TTCTTCTGAGGGTGGTCCAGGTGAATC | |
| | GPGSSESGSSEGGPG | | TCCGGGTGGCTCCAGCGGTTCCGAGT | |
| | SSESGSSEGGPGSSES | | CAGGTTCTGGTGGCGAACCTTCCGAG | |
| | GSSEGGPGESPGGSS | | TCTGGTAGCTCAGGTGAATCTCCGGG | |
| | GSESGSEGSSGPGES | | TGGTTCTAGCGGTTCCGAGTCAGGTG | |
| | SGSSESGSSEGGPGS | | AATCTCCGGGTGGTTCCAGCGGTTCTG | |
| | SESGSSEGGPGSSES | | AGTCAGGTTCCTCCGAAAGCGGTTCTT | |
| | GSSEGGPGSGGEPSE | | CTGAGGGCGGTCCAGGTTCCTCCGAA | |
| | SGSSGESPGGSSGSE | | AGCGGTTCTTCCGAGGGCGGTCCAGG | |
| | SGESPGGSSGSESGS | | TTCTTCTGAAAGCGGTTCTTCCGAGGG | |
| | GGEPSESGSSGSSES | | CGGTCCAGGTGAATCTCCTGGTGGTTC | |
| | GSSEGGPGSGGEPSE | | CAGCGGTTCCGAGTCAGGTGAATCTC | |
| | SGSSGSGGEPSESGS | | CAGGTGGCTCTAGCGGTTCCGAGTCA | |
| | SGSEGSSGPGESSGE | | GGTGAATCTCCTGGTGGTTCTAGCGGT | |
| | SPGGSSGSESGSGGE | | TCTGAATCAGGTTCCTCCGAAAGCGG | |
| | PSESGSSGSGGEPSES | | TTCTTCTGAGGGCGGTCCAGGTTCCTC | |
| | GSSGSGGEPSESGSS | | CGAAAGCGGTTCTTCCGAGGGCGGTC | |
| | GSSESGSSEGGPGES | | CAGGTTCTTCTGAAAGCGGTTCTTCCG | |
| | PGGSSGSESGESPGG | | AGGGCGGTCCAGGTTCCTCTGAAAGC | |
| | SSGSESGESPGGSSG | | GGTTCTTCTGAGGGCGGTCCAGGTTCT | |
| | SESGESPGGSSGSES | | TCCGAAAGCGGTTCTTCCGAGGGCGG | |
| | GESPGGSSGSESGSS | | TCCAGGTTCTTCCGAAAGCGGTTCTTC | |
| | ESGSSEGGPGSGGEP | | TGAAGGCGGTCCAGGTTCTGGTGGCG | |
| | SESGSSGSEGSSGPG | | AACCGTCCGAGTCTGGTAGCTCAGGT | |
| | ESSGSSESGSSEGGP | | GAATCTCCGGGTGGCTCTAGCGGTTC | |
| | GSGGEPSESGSSGSS | | CGAGTCAGGTGAATCTCCTGGTGGTT | |
| | ESGSSEGGPGSGGEP | | CCAGCGGTTCCGAGTCAGGTTCCGGT | |
| | SESGSSGESPGGSSG | | GGCGAACCGTCCGAATCTGGTAGCTC | |
| | SESGESPGGSSGSES | | AGGTAGCGAAGGTTCTTCTGGTCCAG | |
| | GSSESGSSEGGPGSG | | GCGAATCTTCAGGTTCCTCTGAAAGC | |
| | GEPSESGSSGSSESGS | | GGTTCTTCTGAGGGCGGTCCAGGTTCC | |
| | SEGGPGSGGEPSESG | | GGTGGCGAACCGTCCGAATCTGGTAG | |
| | SSGSGGEPSESGSSG | | CTCAGGTAGCGAAGGTTCTTCTGGTCC | |
| | ESPGGSSGSESGSEG | | AGGCGAATCTTCAGGTTCCTCTGAAA | |
| | SSGPGESSGSSESGSS | | GCGGTTCTTCTGAGGGCGGTCCAGGT | |
| | EGGPGSEGSSGPGES | | TCCGGTGGCGAACCTTCCGAATCTGG | |
| | SGFPTIPLSRLFDNA | | TAGCTCAGGTGAATCTCCGGGTGGTT | |
| | MLRAHRLHQLAFDT | | CTAGCGGTTCTGAGTCAGGTTCTGGTG | |
| | YQEFEEAYIPKEQKY | | GTGAACCTTCCGAGTCTGGTAGCTCA | |
| | SFLQNPQTSLCFSESI | | GGTTCTGGTGGCGAACCATCCGAGTC | |
| | PTPSNREETQQKSNL | | TGGTAGCTCAGGTTCTTCCGAAAGCG | |
| | ELLRISLLLIQSWLEP | | GTTCTTCCGAAGGCGGTCCAGGTTCTG | |
| | VQFLRSVFANSLVY | | GTGGTGAACCGTCCGAATCTGGTAGC | |
| | GASDSNVYDLLKDL | | TCAGGTTCTGGTGGCGAACCATCCGA | |
| | EEGIQTLMGRLEDGS | | ATCTGGTAGCTCAGGTAGCGAAGGTT | |
| | PRTGQIFKQTYSKFD | | CTTCTGGTCCTGGCGAATCTTCAGGTG | |
| | TNSHNDDALLKNYG | | AATCTCCAGGTGGCTCTAGCGGTTCC | |
| | LLYCFRKDMDKVET | | GAATCAGGTAGCGAAGGTTCTTCCGG | |
| | FLRIVQCRSVEGSCG | | TCCAGGTGAATCTTCAGGTAGCGAAG | |
| | FGGSEPATSGSETPG | | GTTCTTCTGGTCCTGGTGAATCCTCAG | |
| | TSESATPESGPGSEP | | GTTCCGGTGGCGAACCATCTGAATCT | |
| | ATSGSETPGSPAGSP | | GGTAGCTCAGGTTCCTCTGAAAGCGG | |
| | TSTEEGTSTEPSEGS | | TTCTTCCGAAGGTGGTCCAGGTTCCTC | |
| | APGSEPATSGSETPG | | TGAAAGCGGTTCTTCTGAGGGTGGTC | |
| | SEPATSGSETPGSEP | | CAGGTGAATCTCCGGGTGGCTCCAGC | |
| | ATSGSETPGTSTEPSE | | GGTTCCGAGTCAGGTTCTGGTGGCGA | |
| | GSAPGTSESATPESG | | ACCATCCGAATCTGGTAGCTCAGGTA | |
| | PGSEPATSGSETPGT | | GCGAAGGTTCTTCTGGTCCTGGCGAA | |
| | STEPSEGSAP | | TCTTCAGGTGAATCTCCAGGTGGCTCT | |
| | | | AGCGGTTCCGAATCAGGTAGCGAAGG | |
| | | | TTCTTCCGGTCCTGGTGAGTCTTCAGG | |
| | | | TGAATCTCCAGGTGGCTCTAGCGGTTC | |
| | | | CGAGTCAGGTAGCGAAGGTTCTTCTG | |
| | | | GTCCTGGCGAGTCCTCAGGTTTTCCGA | |
| | | | CTATTCCGCTGTCTCGTCTGTTTGATA | |
| | | | ATGCTATGCTGCGTGCGCACCGTCTGC | |
| | | | ACCAGCTGGCCTTTGATACTTACCAG | |
| | | | GAATTTGAAGAAGCcTACATTCCTAAA | |
| | | | GAGCAGAAGTACTCTTTCCTGCAAAA | |
| | | | CCCACAGACTTCTCTCTGCTTCAGCGA | |
| | | | ATCTATTCCGACGCCTTCCAATCGCGA | |
| | | | GGAAACTCAGCAAAAGTCCAATCTGG | |
| | | | AACTACTCCGCATTTCTCTGCTTCTGA | |
| | | | TTCAGAGCTGGCTAGAACCAGTGCAA | |
| | | | TTTCTGCGTTCCGTCTTCGCCAATAGC | |
| | | | CTAGTTTATGGCGCATCCGACAGCAA | |
| | | | CGTATACGATCTCCTGAAAGATCTCG | |
| | | | AGGAAGGCATTCAGACCCTGATGGGT | |
| | | | CGTCTCGAGGATGGCTCTCCGCGTACT | |
| | | | GGTCAGATCTTCAAGCAGACTTACTCT | |
| | | | AAATTTGATACTAACAGCCACAATGA | |
| | | | CGATGCGCTTCTAAAAAACTATGGTC | |
| | | | TGCTGTATTGTTTTCGTAAAGATATGG | |
| | | | ACAAAGTTGAAACCTTCCTGCGTATT | |
| | | | GTTCAGTGTCGTTCCGTTGAGGGCAG | |
| | | | CTGTGGTTTCTAAGGTGGTAGCGAAC | |
| | | | CGGCAACTTCCGGCTCTGAAACCCCA | |
| | | | GGTACTTCTGAAAGCGCTACTCCTGA | |
| | | | GTCTGGCCCAGGTAGCGAACCTGCTA | |
| | | | CCTCTGGCTCTGAAACCCCAGGTAGC | |
| | | | CCGGCAGGCTCTCCGACTTCCACCGA | |
| | | | GGAAGGTACCTCTACTGAACCTTCTG | |
| | | | AGGGTAGCGCTCCAGGTAGCGAACCG | |
| | | | GCAACCTCTGGCTCTGAAACCCCAGG | |
| | | | TAGCGAACCTGCTACCTCCGGCTCTG | |
| | | | AAACTCCAGGTAGCGAACCGGCTACT | |
| | | | TCCGGTTCTGAAACTCCAGGTACCTCT | |
| | | | ACCGAACCTTCCGAAGGCAGCGCACC | |
| | | | AGGTACTTCTGAAAGCGCAACCCCTG | |
| | | | AATCCGGTCCAGGTAGCGAACCGGCT | |
| | | | ACTTCTGGCTCTGAGACTCCAGGTACT | |
| | | | TCTACCGAACCGTCCGAAGGTAGCGC | |
| | | | ACCA | |
| AE576- | GSPAGSPTSTEEGTS | 741 | GGTAGCCCGGCTGGCTCTCCTACCTCT | 742 |
| hGH- | ESATPESGPGTSTEPS | | ACTGAGGAAGGTACTTCTGAAAGCGC | |
| AE144 | EGSAPGSPAGSPTST | | TACTCCTGAGTCTGGTCCAGGTACCTC | |
| | EEGTSTEPSEGSAPG | | TACTGAACCGTCCGAAGGTAGCGCTC | |
| | TSTEPSEGSAPGTSES | | CAGGTAGCCCAGCAGGCTCTCCGACT | |
| | ATPESGPGSEPATSG | | TCCACTGAGGAAGGTACTTCTACTGA | |
| | SETPGSEPATSGSETP | | ACCTTCCGAAGGCAGCGCACCAGGTA | |
| | GSPAGSPTSTEEGTS | | CCTCTACTGAACCTTCTGAGGGCAGC | |
| | ESATPESGPGTSTEPS | | GCTCCAGGTACTTCTGAAAGCGCTAC | |
| | EGSAPGTSTEPSEGS | | CCCGGAATCTGGCCCAGGTAGCGAAC | |
| | APGSPAGSPTSTEEG | | CGGCTACTTCTGGTTCTGAAACCCCAG | |
| | TSTEPSEGSAPGTSTE | | GTAGCGAACCGGCTACCTCCGGTTCT | |
| | PSEGSAPGTSESATP | | GAAACTCCAGGTAGCCCGGCAGGCTC | |
| | ESGPGTSTEPSEGSA | | TCCGACCTCTACTGAGGAAGGTACTT | |
| | PGTSESATPESGPGS | | CTGAAAGCGCAACCCCGGAGTCCGGC | |
| | EPATSGSETPGTSTEP | | CCAGGTACCTCTACCGAACCGTCTGA | |
| | SEGSAPGTSTEPSEG | | GGGCAGCGCACCAGGTACTTCTACCG | |
| | SAPGTSESATPESGP | | AACCGTCCGAGGGTAGCGCACCAGGT | |
| | GTSESATPESGPGSP | | AGCCCAGCAGGTTCTCCTACCTCCACC | |
| | AGSPTSTEEGTSESA | | GAGGAAGGTACTTCTACCGAACCGTC | |
| | TPESGPGSEPATSGS | | CGAGGGTAGCGCACCAGGTACCTCTA | |
| | ETPGTSESATPESGP | | CTGAACCTTCTGAGGGCAGCGCTCCA | |
| | GTSTEPSEGSAPGTS | | GGTACTTCTGAAAGCGCTACCCCGGA | |
| | TEPSEGSAPGTSTEPS | | GTCCGGTCCAGGTACTTCTACTGAACC | |
| | EGSAPGTSTEPSEGS | | GTCCGAAGGTAGCGCACCAGGTACTT | |
| | APGTSTEPSEGSAPG | | CTGAAAGCGCAACCCCTGAATCCGGT | |
| | TSTEPSEGSAPGSPA | | CCAGGTAGCGAACCGGCTACTTCTGG | |
| | GSPTSTEEGTSTEPSE | | CTCTGAGACTCCAGGTACTTCTACCGA | |
| | GSAPGTSESATPESG | | ACCGTCCGAAGGTAGCGCACCAGGTA | |
| | PGSEPATSGSETPGT | | CTTCTACTGAACCGTCTGAAGGTAGC | |
| | SESATPESGPGSEPA | | GCACCAGGTACTTCTGAAAGCGCAAC | |
| | TSGSETPGTSESATPE | | CCCGGAATCCGGCCCAGGTACCTCTG | |
| | SGPGTSTEPSEGSAP | | AAAGCGCAACCCCGGAGTCCGGCCCA | |
| | GTSESATPESGPGSP | | GGTAGCCCTGCTGGCTCTCCAACCTCC | |
| | AGSPTSTEEGSPAGS | | ACCGAAGAAGGTACCTCTGAAAGCGC | |
| | PTSTEEGSPAGSPTST | | AACCCCTGAATCCGGCCCAGGTAGCG | |
| | EEGTSESATPESGPG | | AACCGGCAACCTCCGGTTCTGAAACC | |
| | TSTEPSEGSAPGFPTI | | CCAGGTACCTCTGAAAGCGCTACTCC | |
| | PLSRLFDNAMLRAH | | GGAGTCTGGCCCAGGTACCTCTACTG | |
| | RLHQLAFDTYQEFEE | | AACCGTCTGAGGGTAGCGCTCCAGGT | |
| | AYIPKEQKYSFLQNP | | ACTTCTACTGAACCGTCCGAAGGTAG | |
| | QTSLCFSESIPTPSNR | | CGCACCAGGTACTTCTACCGAACCGT | |
| | EETQQKSNLELLRIS | | CCGAAGGCAGCGCTCCAGGTACCTCT | |
| | LLLIQSWLEPVQFLR | | ACTGAACCTTCCGAGGGCAGCGCTCC | |
| | SVFANSLVYGASDS | | AGGTACCTCTACCGAACCTTCTGAAG | |
| | NVYDLLKDLEEGIQT | | GTAGCGCACCAGGTACTTCTACCGAA | |
| | LMGRLEDGSPRTGQI | | CCGTCCGAGGGTAGCGCACCAGGTAG | |
| | FKQTYSKFDTNSHN | | CCCAGCAGGTTCTCCTACCTCCACCGA | |
| | DDALLKNYGLLYCF | | GGAAGGTACTTCTACCGAACCGTCCG | |
| | RKDMDKVETFLRIV | | AGGGTAGCGCACCAGGTACCTCTGAA | |
| | QCRSVEGSCGFGGSE | | AGCGCAACTCCTGAGTCTGGCCCAGG | |
| | PATSGSETPGTSESA | | TAGCGAACCTGCTACCTCCGGCTCTG | |
| | TPESGPGSEPATSGS | | AGACTCCAGGTACCTCTGAAAGCGCA | |
| | ETPGSPAGSPTSTEE | | ACCCCGGAATCTGGTCCAGGTAGCGA | |
| | GTSTEPSEGSAPGSE | | ACCTGCAACCTCTGGCTCTGAAACCC | |
| | PATSGSETPGSEPAT | | CAGGTACCTCTGAAAGCGCTACTCCT | |
| | SGSETPGSEPATSGS | | GAATCTGGCCCAGGTACTTCTACTGA | |
| | ETPGTSTEPSEGSAP | | ACCGTCCGAGGGCAGCGCACCAGGTA | |
| | GTSESATPESGPGSE | | CTTCTGAAAGCGCTACTCCTGAGTCCG | |
| | PATSGSETPGTSTEPS | | GCCCAGGTAGCCCGGCTGGCTCTCCG | |
| | EGSAP | | ACTTCCACCGAGGAAGGTAGCCCGGC | |
| | | | TGGCTCTCCAACTTCTACTGAAGAAG | |
| | | | GTAGCCCGGCAGGCTCTCCGACCTCT | |
| | | | ACTGAGGAAGGTACTTCTGAAAGCGC | |
| | | | AACCCCGGAGTCCGGCCCAGGTACCT | |
| | | | CTACCGAACCGTCTGAGGGCAGCGCA | |
| | | | CCAGGTTTTCCGACTATTCCGCTGTCT | |
| | | | CGTCTGTTTGATAATGCTATGCTGCGT | |
| | | | GCGCACCGTCTGCACCAGCTGGCCTTT | |
| | | | GATACTTACCAGGAATTTGAAGAAGC | |
| | | | cTACATTCCTAAAGAGCAGAAGTACTC | |
| | | | TTTCCTGCAAAACCCACAGACTTCTCT | |
| | | | CTGCTTCAGCGAATCTATTCCGACGCC | |
| | | | TTCCAATCGCGAGGAAACTCAGCAAA | |
| | | | AGTCCAATCTGGAACTACTCCGCATTT | |
| | | | CTCTGCTTCTGATTCAGAGCTGGCTAG | |
| | | | AACCAGTGCAATTTCTGCGTTCCGTCT | |
| | | | TCGCCAATAGCCTAGTTTATGGCGCAT | |
| | | | CCGACAGCAACGTATACGATCTCCTG | |
| | | | AAAGATCTCGAGGAAGGCATTCAGAC | |
| | | | CCTGATGGGTCGTCTCGAGGATGGCT | |
| | | | CTCCGCGTACTGGTCAGATCTTCAAGC | |
| | | | AGACTTACTCTAAATTTGATACTAACA | |
| | | | GCCACAATGACGATGCGCTTCTAAAA | |
| | | | AACTATGGTCTGCTGTATTGTTTTCGT | |
| | | | AAAGATATGGACAAAGTTGAAACCTT | |
| | | | CCTGCGTATTGTTCAGTGTCGTTCCGT | |
| | | | TGAGGGCAGCTGTGGTTTCTAAGGTG | |
| | | | GTAGCGAACCGGCAACTTCCGGCTCT | |
| | | | GAAACCCCAGGTACTTCTGAAAGCGC | |
| | | | TACTCCTGAGTCTGGCCCAGGTAGCG | |
| | | | AACCTGCTACCTCTGGCTCTGAAACCC | |
| | | | CAGGTAGCCCGGCAGGCTCTCCGACT | |
| | | | TCCACCGAGGAAGGTACCTCTACTGA | |
| | | | ACCTTCTGAGGGTAGCGCTCCAGGTA | |
| | | | GCGAACCGGCAACCTCTGGCTCTGAA | |
| | | | ACCCCAGGTAGCGAACCTGCTACCTC | |
| | | | CGGCTCTGAAACTCCAGGTAGCGAAC | |
| | | | CGGCTACTTCCGGTTCTGAAACTCCAG | |
| | | | GTACCTCTACCGAACCTTCCGAAGGC | |
| | | | AGCGCACCAGGTACTTCTGAAAGCGC | |
| | | | AACCCCTGAATCCGGTCCAGGTAGCG | |
| | | | AACCGGCTACTTCTGGCTCTGAGACTC | |
| | | | CAGGTACTTCTACCGAACCGTCCGAA | |
| | | | GGTAGCGCACCA | |
| AF576- | GSTSSTAESPGPGSTS | 743 | GGTTCTACTAGCTCTACCGCTGAATCT | 744 |
| hGH- | STAESPGPGSTSESPS | | CCTGGCCCAGGTTCCACTAGCTCTACC | |
| AE144 | GTAPGSTSSTAESPG | | GCAGAATCTCCGGGCCCAGGTTCTAC | |
| | PGSTSSTAESPGPGTS | | TAGCGAATCCCCTTCTGGTACCGCTCC | |
| | TPESGSASPGSTSESP | | AGGTTCTACTAGCTCTACCGCTGAATC | |
| | SGTAPGTSPSGESST | | TCCGGGTCCAGGTTCTACCAGCTCTAC | |
| | APGSTSESPSGTAPG | | TGCAGAATCTCCTGGCCCAGGTACTTC | |
| | STSESPSGTAPGTSPS | | TACTCCGGAAAGCGGTTCCGCTTCTCC | |
| | GESSTAPGSTSESPSG | | AGGTTCTACCAGCGAATCTCCTTCTGG | |
| | TAPGSTSESPSGTAP | | CACCGCTCCAGGTACCTCTCCTAGCG | |
| | GTSPSGESSTAPGSTS | | GCGAATCTTCTACCGCTCCAGGTTCTA | |
| | ESPSGTAPGSTSESPS | | CTAGCGAATCTCCTTCTGGCACTGCAC | |
| | GTAPGSTSESPSGTA | | CAGGTTCTACCAGCGAATCTCCTTCTG | |
| | PGTSTPESGSASPGST | | GCACCGCTCCAGGTACCTCTCCTAGC | |
| | SESPSGTAPGTSTPES | | GGCGAATCTTCTACCGCTCCAGGTTCT | |
| | GSASPGSTSSTAESP | | ACTAGCGAATCTCCTTCTGGCACTGCA | |
| | GPGSTSSTAESPGPG | | CCAGGTTCTACCAGCGAATCTCCTTCT | |
| | TSTPESGSASPGTSTP | | GGCACCGCTCCAGGTACCTCTCCTAG | |
| | ESGSASPGSTSESPSG | | CGGCGAATCTTCTACCGCTCCAGGTTC | |
| | TAPGTSTPESGSASP | | TACTAGCGAATCTCCTTCTGGCACTGC | |
| | GTSTPESGSASPGSTS | | ACCAGGTTCTACTAGCGAATCTCCTTC | |
| | ESPSGTAPGSTSESPS | | TGGCACTGCACCAGGTTCTACCAGCG | |
| | GTAPGSTSESPSGTA | | AATCTCCGTCTGGCACTGCACCAGGT | |
| | PGSTSSTAESPGPGTS | | ACCTCTACCCCTGAAAGCGGTTCCGCT | |
| | TPESGSASPGTSTPES | | TCTCCAGGTTCTACTAGCGAATCTCCT | |
| | GSASPGSTSESPSGT | | TCTGGTACCGCTCCAGGTACTTCTACC | |
| | APGSTSESPSGTAPG | | CCTGAAAGCGGCTCCGCTTCTCCAGG | |
| | TSTPESGSASPGSTSE | | TTCCACTAGCTCTACCGCTGAATCTCC | |
| | SPSGTAPGSTSESPSG | | GGGTCCAGGTTCTACTAGCTCTACTGC | |
| | TAPGTSTPESGSASP | | AGAATCTCCTGGCCCAGGTACCTCTA | |
| | GTSPSGESSTAPGSTS | | CTCCGGAAAGCGGCTCTGCATCTCCA | |
| | STAESPGPGTSPSGES | | GGTACTTCTACCCCTGAAAGCGGTTCT | |
| | STAPGSTSSTAESPGP | | GCATCTCCAGGTTCTACTAGCGAATCC | |
| | GTSTPESGSASPGSTS | | CCGTCTGGTACCGCACCAGGTACTTCT | |
| | ESPSGTAPGSTSSTA | | ACCCCGGAAAGCGGCTCTGCTTCTCC | |
| | ESPGPGTSTPESGSAS | | AGGTACTTCTACCCCGGAAAGCGGCT | |
| | PGTSTPESGSASPGFP | | CCGCATCTCCAGGTTCTACTAGCGAAT | |
| | TIPLSRLFDNAMLRA | | CTCCTTCTGGTACCGCTCCAGGTTCTA | |
| | HRLHQLAFDTYQEF | | CCAGCGAATCCCCGTCTGGTACTGCTC | |
| | EEAYIPKEQKYSFLQ | | CAGGTTCTACCAGCGAATCTCCTTCTG | |
| | NPQTSLCFSESIPTPS | | GTACTGCACCAGGTTCTACTAGCTCTA | |
| | NREETQQKSNLELLR | | CTGCAGAATCTCCTGGCCCAGGTACC | |
| | ISLLLIQSWLEPVQFL | | TCTACTCCGGAAAGCGGCTCTGCATCT | |
| | RSVFANSLVYGASD | | CCAGGTACTTCTACCCCTGAAAGCGG | |
| | SNVYDLLKDLEEGIQ | | TTCTGCATCTCCAGGTTCTACTAGCGA | |
| | TLMGRLEDGSPRTG | | ATCTCCTTCTGGCACTGCACCAGGTTC | |
| | QIFKQTYSKFDTNSH | | TACCAGCGAATCTCCGTCTGGCACTG | |
| | NDDALLKNYGLLYC | | CACCAGGTACCTCTACCCCTGAAAGC | |
| | FRKDMDKVETFLRI | | GGTTCCGCTTCTCCAGGTTCTACTAGC | |
| | VQCRSVEGSCGFGG | | GAATCTCCTTCTGGCACTGCACCAGGT | |
| | SEPATSGSETPGTSES | | TCTACCAGCGAATCTCCGTCTGGCACT | |
| | ATPESGPGSEPATSG | | GCACCAGGTACCTCTACCCCTGAAAG | |
| | SETPGSPAGSPTSTEE | | CGGTTCCGCTTCTCCAGGTACTTCTCC | |
| | GTSTEPSEGSAPGSE | | GAGCGGTGAATCTTCTACCGCACCAG | |
| | PATSGSETPGSEPAT | | GTTCTACTAGCTCTACCGCTGAATCTC | |
| | SGSETPGSEPATSGS | | CGGGCCCAGGTACTTCTCCGAGCGGT | |
| | ETPGTSTEPSEGSAP | | GAATCTTCTACTGCTCCAGGTTCCACT | |
| | GTSESATPESGPGSE | | AGCTCTACTGCTGAATCTCCTGGCCCA | |
| | PATSGSETPGTSTEPS | | GGTACTTCTACTCCGGAAAGCGGTTC | |
| | EGSAP | | CGCTTCTCCAGGTTCTACTAGCGAATC | |
| | | | TCCGTCTGGCACCGCACCAGGTTCTAC | |
| | | | TAGCTCTACTGCAGAATCTCCTGGCCC | |
| | | | AGGTACCTCTACTCCGGAAAGCGGCT | |
| | | | CTGCATCTCCAGGTACTTCTACCCCTG | |
| | | | AAAGCGGTTCTGCATCTCCAGGTTTTC | |
| | | | CGACTATTCCGCTGTCTCGTCTGTTTG | |
| | | | ATAATGCTATGCTGCGTGCGCACCGT | |
| | | | CTGCACCAGCTGGCCTTTGATACTTAC | |
| | | | CAGGAATTTGAAGAAGCcTACATTCCT | |
| | | | AAAGAGCAGAAGTACTCTTTCCTGCA | |
| | | | AAACCCACAGACTTCTCTCTGCTTCAG | |
| | | | CGAATCTATTCCGACGCCTTCCAATCG | |
| | | | CGAGGAAACTCAGCAAAAGTCCAATC | |
| | | | TGGAACTACTCCGCATTTCTCTGCTTC | |
| | | | TGATTCAGAGCTGGCTAGAACCAGTG | |
| | | | CAATTTCTGCGTTCCGTCTTCGCCAAT | |
| | | | AGCCTAGTTTATGGCGCATCCGACAG | |
| | | | CAACGTATACGATCTCCTGAAAGATC | |
| | | | TCGAGGAAGGCATTCAGACCCTGATG | |
| | | | GGTCGTCTCGAGGATGGCTCTCCGCG | |
| | | | TACTGGTCAGATCTTCAAGCAGACTT | |
| | | | ACTCTAAATTTGATACTAACAGCCAC | |
| | | | AATGACGATGCGCTTCTAAAAAACTA | |
| | | | TGGTCTGCTGTATTGTTTTCGTAAAGA | |
| | | | TATGGACAAAGTTGAAACCTTCCTGC | |
| | | | GTATTGTTCAGTGTCGTTCCGTTGAGG | |
| | | | GCAGCTGTGGTTTCTAAGGTGGTAGC | |
| | | | GAACCGGCAACTTCCGGCTCTGAAAC | |
| | | | CCCAGGTACTTCTGAAAGCGCTACTC | |
| | | | CTGAGTCTGGCCCAGGTAGCGAACCT | |
| | | | GCTACCTCTGGCTCTGAAACCCCAGG | |
| | | | TAGCCCGGCAGGCTCTCCGACTTCCA | |
| | | | CCGAGGAAGGTACCTCTACTGAACCT | |
| | | | TCTGAGGGTAGCGCTCCAGGTAGCGA | |
| | | | ACCGGCAACCTCTGGCTCTGAAACCC | |
| | | | CAGGTAGCGAACCTGCTACCTCCGGC | |
| | | | TCTGAAACTCCAGGTAGCGAACCGGC | |
| | | | TACTTCCGGTTCTGAAACTCCAGGTAC | |
| | | | CTCTACCGAACCTTCCGAAGGCAGCG | |
| | | | CACCAGGTACTTCTGAAAGCGCAACC | |
| | | | CCTGAATCCGGTCCAGGTAGCGAACC | |
| | | | GGCTACTTCTGGCTCTGAGACTCCAG | |
| | | | GTACTTCTACCGAACCGTCCGAAGGT | |
| | | | AGCGCACCA | |
| AE624- | MAEPAGSPTSTEEGT | 745 | ATGGCTGAACCTGCTGGCTCTCCAAC | 746 |
| hGH- | PGSGTASSSPGSSTPS | | CTCCACTGAGGAAGGTACCCCGGGTA | |
| AE144 | GATGSPGASPGTSST | | GCGGTACTGCTTCTTCCTCTCCAGGTA | |
| | GSPGSPAGSPTSTEE | | GCTCTACCCCTTCTGGTGCAACCGGCT | |
| | GTSESATPESGPGTS | | CTCCAGGTGCTTCTCCGGGCACCAGCT | |
| | TEPSEGSAPGSPAGS | | CTACCGGTTCTCCAGGTAGCCCGGCT | |
| | PTSTEEGTSTEPSEGS | | GGCTCTCCTACCTCTACTGAGGAAGG | |
| | APGTSTEPSEGSAPG | | TACTTCTGAAAGCGCTACTCCTGAGTC | |
| | TSESATPESGPGSEP | | TGGTCCAGGTACCTCTACTGAACCGTC | |
| | ATSGSETPGSEPATS | | CGAAGGTAGCGCTCCAGGTAGCCCAG | |
| | GSETPGSPAGSPTST | | CAGGCTCTCCGACTTCCACTGAGGAA | |
| | EEGTSESATPESGPG | | GGTACTTCTACTGAACCTTCCGAAGG | |
| | TSTEPSEGSAPGTSTE | | CAGCGCACCAGGTACCTCTACTGAAC | |
| | PSEGSAPGSPAGSPT | | CTTCTGAGGGCAGCGCTCCAGGTACT | |
| | STEEGTSTEPSEGSAP | | TCTGAAAGCGCTACCCCGGAATCTGG | |
| | GTSTEPSEGSAPGTS | | CCCAGGTAGCGAACCGGCTACTTCTG | |
| | ESATPESGPGTSTEPS | | GTTCTGAAACCCCAGGTAGCGAACCG | |
| | EGSAPGTSESATPES | | GCTACCTCCGGTTCTGAAACTCCAGGT | |
| | GPGSEPATSGSETPG | | AGCCCGGCAGGCTCTCCGACCTCTAC | |
| | TSTEPSEGSAPGTSTE | | TGAGGAAGGTACTTCTGAAAGCGCAA | |
| | PSEGSAPGTSESATP | | CCCCGGAGTCCGGCCCAGGTACCTCT | |
| | ESGPGTSESATPESG | | ACCGAACCGTCTGAGGGCAGCGCACC | |
| | PGSPAGSPTSTEEGT | | AGGTACTTCTACCGAACCGTCCGAGG | |
| | SESATPESGPGSEPA | | GTAGCGCACCAGGTAGCCCAGCAGGT | |
| | TSGSETPGTSESATPE | | TCTCCTACCTCCACCGAGGAAGGTAC | |
| | SGPGTSTEPSEGSAP | | TTCTACCGAACCGTCCGAGGGTAGCG | |
| | GTSTEPSEGSAPGTS | | CACCAGGTACCTCTACTGAACCTTCTG | |
| | TEPSEGSAPGTSTEPS | | AGGGCAGCGCTCCAGGTACTTCTGAA | |
| | EGSAPGTSTEPSEGS | | AGCGCTACCCCGGAGTCCGGTCCAGG | |
| | APGTSTEPSEGSAPG | | TACTTCTACTGAACCGTCCGAAGGTA | |
| | SPAGSPTSTEEGTSTE | | GCGCACCAGGTACTTCTGAAAGCGCA | |
| | PSEGSAPGTSESATP | | ACCCCTGAATCCGGTCCAGGTAGCGA | |
| | ESGPGSEPATSGSET | | ACCGGCTACTTCTGGCTCTGAGACTCC | |
| | PGTSESATPESGPGS | | AGGTACTTCTACCGAACCGTCCGAAG | |
| | EPATSGSETPGTSES | | GTAGCGCACCAGGTACTTCTACTGAA | |
| | ATPESGPGTSTEPSE | | CCGTCTGAAGGTAGCGCACCAGGTAC | |
| | GSAPGTSESATPESG | | TTCTGAAAGCGCAACCCCGGAATCCG | |
| | PGSPAGSPTSTEEGSP | | GCCCAGGTACCTCTGAAAGCGCAACC | |
| | AGSPTSTEEGSPAGS | | CCGGAGTCCGGCCCAGGTAGCCCTGC | |
| | PTSTEEGTSESATPES | | TGGCTCTCCAACCTCCACCGAAGAAG | |
| | GPGTSTEPSEGSAPG | | GTACCTCTGAAAGCGCAACCCCTGAA | |
| | FPTIPLSRLFDNAML | | TCCGGCCCAGGTAGCGAACCGGCAAC | |
| | RAHRLHQLAFDTYQ | | CTCCGGTTCTGAAACCCCAGGTACCTC | |
| | EFEEAYIPKEQKYSF | | TGAAAGCGCTACTCCGGAGTCTGGCC | |
| | LQNPQTSLCFSESIPT | | CAGGTACCTCTACTGAACCGTCTGAG | |
| | PSNREETQQKSNLEL | | GGTAGCGCTCCAGGTACTTCTACTGA | |
| | LRISLLLIQSWLEPVQ | | ACCGTCCGAAGGTAGCGCACCAGGTA | |
| | FLRSVFANSLVYGAS | | CTTCTACCGAACCGTCCGAAGGCAGC | |
| | DSNVYDLLKDLEEGI | | GCTCCAGGTACCTCTACTGAACCTTCC | |
| | QTLMGRLEDGSPRT | | GAGGGCAGCGCTCCAGGTACCTCTAC | |
| | GQIFKQTYSKFDTNS | | CGAACCTTCTGAAGGTAGCGCACCAG | |
| | HNDDALLKNYGLLY | | GTACTTCTACCGAACCGTCCGAGGGT | |
| | CFRKDMDKVETFLRI | | AGCGCACCAGGTAGCCCAGCAGGTTC | |
| | VQCRSVEGSCGFGG | | TCCTACCTCCACCGAGGAAGGTACTT | |
| | SEPATSGSETPGTSES | | CTACCGAACCGTCCGAGGGTAGCGCA | |
| | ATPESGPGSEPATSG | | CCAGGTACCTCTGAAAGCGCAACTCC | |
| | SETPGSPAGSPTSTEE | | TGAGTCTGGCCCAGGTAGCGAACCTG | |
| | GTSTEPSEGSAPGSE | | CTACCTCCGGCTCTGAGACTCCAGGT | |
| | PATSGSETPGSEPAT | | ACCTCTGAAAGCGCAACCCCGGAATC | |
| | SGSETPGSEPATSGS | | TGGTCCAGGTAGCGAACCTGCAACCT | |
| | ETPGTSTEPSEGSAP | | CTGGCTCTGAAACCCCAGGTACCTCT | |
| | GTSESATPESGPGSE | | GAAAGCGCTACTCCTGAATCTGGCCC | |
| | PATSGSETPGTSTEPS | | AGGTACTTCTACTGAACCGTCCGAGG | |
| | EGSAP | | GCAGCGCACCAGGTACTTCTGAAAGC | |
| | | | GCTACTCCTGAGTCCGGCCCAGGTAG | |
| | | | CCCGGCTGGCTCTCCGACTTCCACCGA | |
| | | | GGAAGGTAGCCCGGCTGGCTCTCCAA | |
| | | | CTTCTACTGAAGAAGGTAGCCCGGCA | |
| | | | GGCTCTCCGACCTCTACTGAGGAAGG | |
| | | | TACTTCTGAAAGCGCAACCCCGGAGT | |
| | | | CCGGCCCAGGTACCTCTACCGAACCG | |
| | | | TCTGAGGGCAGCGCACCAGGTTTTCC | |
| | | | GACTATTCCGCTGTCTCGTCTGTTTGA | |
| | | | TAATGCTATGCTGCGTGCGCACCGTCT | |
| | | | GCACCAGCTGGCCTTTGATACTTACCA | |
| | | | GGAATTTGAAGAAGCcTACATTCCTAA | |
| | | | AGAGCAGAAGTACTCTTTCCTGCAAA | |
| | | | ACCCACAGACTTCTCTCTGCTTCAGCG | |
| | | | AATCTATTCCGACGCCTTCCAATCGCG | |
| | | | AGGAAACTCAGCAAAAGTCCAATCTG | |
| | | | GAACTACTCCGCATTTCTCTGCTTCTG | |
| | | | ATTCAGAGCTGGCTAGAACCAGTGCA | |
| | | | ATTTCTGCGTTCCGTCTTCGCCAATAG | |
| | | | CCTAGTTTATGGCGCATCCGACAGCA | |
| | | | ACGTATACGATCTCCTGAAAGATCTC | |
| | | | GAGGAAGGCATTCAGACCCTGATGGG | |
| | | | TCGTCTCGAGGATGGCTCTCCGCGTAC | |
| | | | TGGTCAGATCTTCAAGCAGACTTACTC | |
| | | | TAAATTTGATACTAACAGCCACAATG | |
| | | | ACGATGCGCTTCTAAAAAACTATGGT | |
| | | | CTGCTGTATTGTTTTCGTAAAGATATG | |
| | | | GACAAAGTTGAAACCTTCCTGCGTAT | |
| | | | TGTTCAGTGTCGTTCCGTTGAGGGCAG | |
| | | | CTGTGGTTTCTAAGGTGGTAGCGAAC | |
| | | | CGGCAACTTCCGGCTCTGAAACCCCA | |
| | | | GGTACTTCTGAAAGCGCTACTCCTGA | |
| | | | GTCTGGCCCAGGTAGCGAACCTGCTA | |
| | | | CCTCTGGCTCTGAAACCCCAGGTAGC | |
| | | | CCGGCAGGCTCTCCGACTTCCACCGA | |
| | | | GGAAGGTACCTCTACTGAACCTTCTG | |
| | | | AGGGTAGCGCTCCAGGTAGCGAACCG | |
| | | | GCAACCTCTGGCTCTGAAACCCCAGG | |
| | | | TAGCGAACCTGCTACCTCCGGCTCTG | |
| | | | AAACTCCAGGTAGCGAACCGGCTACT | |
| | | | TCCGGTTCTGAAACTCCAGGTACCTCT | |
| | | | ACCGAACCTTCCGAAGGCAGCGCACC | |
| | | | AGGTACTTCTGAAAGCGCAACCCCTG | |
| | | | AATCCGGTCCAGGTAGCGAACCGGCT | |
| | | | ACTTCTGGCTCTGAGACTCCAGGTACT | |
| | | | TCTACCGAACCGTCCGAAGGTAGCGC | |
| | | | ACCA | |
| AD836- | GSSESGSSEGGPGSS | 747 | GGTTCCTCTGAAAGCGGTTCTTCCGAA | 748 |
| hGH- | ESGSSEGGPGESPGG | | GGTGGTCCAGGTTCCTCTGAAAGCGG | |
| AE144 | SSGSESGSGGEPSES | | TTCTTCTGAGGGTGGTCCAGGTGAATC | |
| | GSSGESPGGSSGSES | | TCCGGGTGGCTCCAGCGGTTCCGAGT | |
| | GESPGGSSGSESGSS | | CAGGTTCTGGTGGCGAACCTTCCGAG | |
| | ESGSSEGGPGSSESG | | TCTGGTAGCTCAGGTGAATCTCCGGG | |
| | SSEGGPGSSESGSSE | | TGGTTCTAGCGGTTCCGAGTCAGGTG | |
| | GGPGESPGGSSGSES | | AATCTCCGGGTGGTTCCAGCGGTTCTG | |
| | GESPGGSSGSESGES | | AGTCAGGTTCCTCCGAAAGCGGTTCTT | |
| | PGGSSGSESGSSESG | | CTGAGGGCGGTCCAGGTTCCTCCGAA | |
| | SSEGGPGSSESGSSE | | AGCGGTTCTTCCGAGGGCGGTCCAGG | |
| | GGPGSSESGSSEGGP | | TTCTTCTGAAAGCGGTTCTTCCGAGGG | |
| | GSSESGSSEGGPGSS | | CGGTCCAGGTGAATCTCCTGGTGGTTC | |
| | ESGSSEGGPGSSESG | | CAGCGGTTCCGAGTCAGGTGAATCTC | |
| | SSEGGPGSGGEPSES | | CAGGTGGCTCTAGCGGTTCCGAGTCA | |
| | GSSGESPGGSSGSES | | GGTGAATCTCCTGGTGGTTCTAGCGGT | |
| | GESPGGSSGSESGSG | | TCTGAATCAGGTTCCTCCGAAAGCGG | |
| | GEPSESGSSGSEGSS | | TTCTTCTGAGGGCGGTCCAGGTTCCTC | |
| | GPGESSGSSESGSSE | | CGAAAGCGGTTCTTCCGAGGGCGGTC | |
| | GGPGSGGEPSESGSS | | CAGGTTCTTCTGAAAGCGGTTCTTCCG | |
| | GSEGSSGPGESSGSS | | AGGGCGGTCCAGGTTCCTCTGAAAGC | |
| | ESGSSEGGPGSGGEP | | GGTTCTTCTGAGGGCGGTCCAGGTTCT | |
| | SESGSSGESPGGSSG | | TCCGAAAGCGGTTCTTCCGAGGGCGG | |
| | SESGSGGEPSESGSS | | TCCAGGTTCTTCCGAAAGCGGTTCTTC | |
| | GSGGEPSESGSSGSS | | TGAAGGCGGTCCAGGTTCTGGTGGCG | |
| | ESGSSEGGPGSGGEP | | AACCGTCCGAGTCTGGTAGCTCAGGT | |
| | SESGSSGSGGEPSES | | GAATCTCCGGGTGGCTCTAGCGGTTC | |
| | GSSGSEGSSGPGESS | | CGAGTCAGGTGAATCTCCTGGTGGTT | |
| | GESPGGSSGSESGSE | | CCAGCGGTTCCGAGTCAGGTTCCGGT | |
| | GSSGPGESSGSEGSS | | GGCGAACCGTCCGAATCTGGTAGCTC | |
| | GPGESSGSGGEPSES | | AGGTAGCGAAGGTTCTTCTGGTCCAG | |
| | GSSGSSESGSSEGGP | | GCGAATCTTCAGGTTCCTCTGAAAGC | |
| | GSSESGSSEGGPGES | | GGTTCTTCTGAGGGCGGTCCAGGTTCC | |
| | PGGSSGSESGSGGEP | | GGTGGCGAACCGTCCGAATCTGGTAG | |
| | SESGSSGSEGSSGPG | | CTCAGGTAGCGAAGGTTCTTCTGGTCC | |
| | ESSGESPGGSSGSES | | AGGCGAATCTTCAGGTTCCTCTGAAA | |
| | GSEGSSGPGSSESGS | | GCGGTTCTTCTGAGGGCGGTCCAGGT | |
| | SEGGPGSGGEPSESG | | TCCGGTGGCGAACCTTCCGAATCTGG | |
| | SSGSEGSSGPGESSG | | TAGCTCAGGTGAATCTCCGGGTGGTT | |
| | SEGSSGPGESSGSEG | | CTAGCGGTTCTGAGTCAGGTTCTGGTG | |
| | SSGPGESSGSGGEPS | | GTGAACCTTCCGAGTCTGGTAGCTCA | |
| | ESGSSGSGGEPSESG | | GGTTCTGGTGGCGAACCATCCGAGTC | |
| | SSGESPGGSSGSESG | | TGGTAGCTCAGGTTCTTCCGAAAGCG | |
| | ESPGGSSGSESGSGG | | GTTCTTCCGAAGGCGGTCCAGGTTCTG | |
| | EPSESGSSGSEGSSGP | | GTGGTGAACCGTCCGAATCTGGTAGC | |
| | GESSGESPGGSSGSE | | TCAGGTTCTGGTGGCGAACCATCCGA | |
| | SGSSESGSSEGGPGS | | ATCTGGTAGCTCAGGTAGCGAAGGTT | |
| | SESGSSEGGPGSSES | | CTTCTGGTCCTGGCGAATCTTCAGGTG | |
| | GSSEGGPGSGGEPSE | | AATCTCCAGGTGGCTCTAGCGGTTCC | |
| | SGSSGSSESGSSEGG | | GAATCAGGTAGCGAAGGTTCTTCCGG | |
| | PGESPGGSSGSESGS | | TCCAGGTGAATCTTCAGGTAGCGAAG | |
| | GGEPSESGSSGSSES | | GTTCTTCTGGTCCTGGTGAATCCTCAG | |
| | GSSEGGPGESPGGSS | | GTTCCGGTGGCGAACCATCTGAATCT | |
| | GSESGSGGEPSESGS | | GGTAGCTCAGGTTCCTCTGAAAGCGG | |
| | SGESPGGSSGSESGS | | TTCTTCCGAAGGTGGTCCAGGTTCCTC | |
| | GGEPSESGSSGFPTIP | | TGAAAGCGGTTCTTCTGAGGGTGGTC | |
| | LSRLFDNAMLRAHR | | CAGGTGAATCTCCGGGTGGCTCCAGC | |
| | LHQLAFDTYQEFEE | | GGTTCCGAGTCAGGTTCTGGTGGCGA | |
| | AYIPKEQKYSFLQNP | | ACCATCCGAATCTGGTAGCTCAGGTA | |
| | QTSLCFSESIPTPSNR | | GCGAAGGTTCTTCTGGTCCTGGCGAA | |
| | EETQQKSNLELLRIS | | TCTTCAGGTGAATCTCCAGGTGGCTCT | |
| | LLLIQSWLEPVQFLR | | AGCGGTTCCGAATCAGGTAGCGAAGG | |
| | SVFANSLVYGASDS | | TTCTTCCGGTCCaGGTTCCTCTGAAAG | |
| | NVYDLLKDLEEGIQT | | CGGTTCTTCTGAGGGCGGTCCAGGTTC | |
| | LMGRLEDGSPRTGQI | | TGGTGGCGAACCATCTGAATCTGGTA | |
| | FKQTYSKFDTNSHN | | GCTCAGGTAGCGAAGGTTCTTCCGGT | |
| | DDALLKNYGLLYCF | | CCGGGTGAATCTTCAGGTAGCGAAGG | |
| | RKDMDKVETFLRIV | | TTCTTCCGGTCCAGGTGAATCTTCAGG | |
| | QCRSVEGSCGFGGSE | | TAGCGAAGGTTCTTCTGGTCCTGGTGA | |
| | PATSGSETPGTSESA | | ATCCTCAGGTTCCGGTGGCGAACCAT | |
| | TPESGPGSEPATSGS | | CTGAATCTGGTAGCTCAGGTTCTGGTG | |
| | ETPGSPAGSPTSTEE | | GCGAACCATCCGAATCTGGTAGCTCA | |
| | GTSTEPSEGSAPGSE | | GGTGAATCTCCGGGTGGCTCCAGCGG | |
| | PATSGSETPGSEPAT | | TTCTGAATCAGGTGAATCTCCTGGTGG | |
| | SGSETPGSEPATSGS | | CTCCAGCGGTTCTGAGTCAGGTTCTGG | |
| | ETPGTSTEPSEGSAP | | TGGCGAACCATCCGAATCTGGTAGCT | |
| | GTSESATPESGPGSE | | CAGGTAGCGAAGGTTCTTCTGGTCCT | |
| | PATSGSETPGTSTEPS | | GGCGAATCTTCAGGTGAATCTCCAGG | |
| | EGSAP | | TGGCTCTAGCGGTTCCGAATCAGGTTC | |
| | | | CTCTGAAAGCGGTTCTTCTGAGGGCG | |
| | | | GTCCAGGTTCTTCCGAAAGCGGTTCTT | |
| | | | CCGAGGGCGGTCCAGGTTCTTCCGAA | |
| | | | AGCGGTTCTTCTGAAGGCGGTCCAGG | |
| | | | TTCTGGTGGCGAACCGTCCGAATCTG | |
| | | | GTAGCTCAGGTTCCTCCGAAAGCGGT | |
| | | | TCTTCTGAAGGTGGTCCAGGTGAATCT | |
| | | | CCAGGTGGTTCTAGCGGTTCTGAATC | |
| | | | AGGTTCTGGTGGCGAACCGTCCGAAT | |
| | | | CTGGTAGCTCAGGTTCCTCCGAAAGC | |
| | | | GGTTCTTCTGAAGGTGGTCCAGGTGA | |
| | | | ATCTCCAGGTGGTTCTAGCGGTTCTGA | |
| | | | ATCAGGTTCTGGTGGCGAACCGTCCG | |
| | | | AATCTGGTAGCTCAGGTGAATCTCCT | |
| | | | GGTGGTTCCAGCGGTTCCGAGTCAGG | |
| | | | TTCTGGTGGCGAACCTTCCGAATCTGG | |
| | | | TAGCTCAGGTTTTCCGACTATTCCGCT | |
| | | | GTCTCGTCTGTTTGATAATGCTATGCT | |
| | | | GCGTGCGCACCGTCTGCACCAGCTGG | |
| | | | CCTTTGATACTTACCAGGAATTTGAAG | |
| | | | AAGCcTACATTCCTAAAGAGCAGAAG | |
| | | | TACTCTTTCCTGCAAAACCCACAGACT | |
| | | | TCTCTCTGCTTCAGCGAATCTATTCCG | |
| | | | ACGCCTTCCAATCGCGAGGAAACTCA | |
| | | | GCAAAAGTCCAATCTGGAACTACTCC | |
| | | | GCATTTCTCTGCTTCTGATTCAGAGCT | |
| | | | GGCTAGAACCAGTGCAATTTCTGCGT | |
| | | | TCCGTCTTCGCCAATAGCCTAGTTTAT | |
| | | | GGCGCATCCGACAGCAACGTATACGA | |
| | | | TCTCCTGAAAGATCTCGAGGAAGGCA | |
| | | | TTCAGACCCTGATGGGTCGTCTCGAG | |
| | | | GATGGCTCTCCGCGTACTGGTCAGAT | |
| | | | CTTCAAGCAGACTTACTCTAAATTTGA | |
| | | | TACTAACAGCCACAATGACGATGCGC | |
| | | | TTCTAAAAAACTATGGTCTGCTGTATT | |
| | | | GTTTTCGTAAAGATATGGACAAAGTT | |
| | | | GAAACCTTCCTGCGTATTGTTCAGTGT | |
| | | | CGTTCCGTTGAGGGCAGCTGTGGTTTC | |
| | | | TAAGGTGGTAGCGAACCGGCAACTTC | |
| | | | CGGCTCTGAAACCCCAGGTACTTCTG | |
| | | | AAAGCGCTACTCCTGAGTCTGGCCCA | |
| | | | GGTAGCGAACCTGCTACCTCTGGCTCT | |
| | | | GAAACCCCAGGTAGCCCGGCAGGCTC | |
| | | | TCCGACTTCCACCGAGGAAGGTACCT | |
| | | | CTACTGAACCTTCTGAGGGTAGCGCT | |
| | | | CCAGGTAGCGAACCGGCAACCTCTGG | |
| | | | CTCTGAAACCCCAGGTAGCGAACCTG | |
| | | | CTACCTCCGGCTCTGAAACTCCAGGT | |
| | | | AGCGAACCGGCTACTTCCGGTTCTGA | |
| | | | AACTCCAGGTACCTCTACCGAACCTTC | |
| | | | CGAAGGCAGCGCACCAGGTACTTCTG | |
| | | | AAAGCGCAACCCCTGAATCCGGTCCA | |
| | | | GGTAGCGAACCGGCTACTTCTGGCTC | |
| | | | TGAGACTCCAGGTACTTCTACCGAAC | |
| | | | CGTCCGAAGGTAGCGCACCA | |
| AE864- | GSPAGSPTSTEEGTS | 749 | GGTAGCCCGGCTGGCTCTCCTACCTCT | 750 |
| hGH- | ESATPESGPGTSTEPS | | ACTGAGGAAGGTACTTCTGAAAGCGC | |
| AE144 | EGSAPGSPAGSPTST | | TACTCCTGAGTCTGGTCCAGGTACCTC | |
| | EEGTSTEPSEGSAPG | | TACTGAACCGTCCGAAGGTAGCGCTC | |
| | TSTEPSEGSAPGTSES | | CAGGTAGCCCAGCAGGCTCTCCGACT | |
| | ATPESGPGSEPATSG | | TCCACTGAGGAAGGTACTTCTACTGA | |
| | SETPGSEPATSGSETP | | ACCTTCCGAAGGCAGCGCACCAGGTA | |
| | GSPAGSPTSTEEGTS | | CCTCTACTGAACCTTCTGAGGGCAGC | |
| | ESATPESGPGTSTEPS | | GCTCCAGGTACTTCTGAAAGCGCTAC | |
| | EGSAPGTSTEPSEGS | | CCCGGAATCTGGCCCAGGTAGCGAAC | |
| | APGSPAGSPTSTEEG | | CGGCTACTTCTGGTTCTGAAACCCCAG | |
| | TSTEPSEGSAPGTSTE | | GTAGCGAACCGGCTACCTCCGGTTCT | |
| | PSEGSAPGTSESATP | | GAAACTCCAGGTAGCCCGGCAGGCTC | |
| | ESGPGTSTEPSEGSA | | TCCGACCTCTACTGAGGAAGGTACTT | |
| | PGTSESATPESGPGS | | CTGAAAGCGCAACCCCGGAGTCCGGC | |
| | EPATSGSETPGTSTEP | | CCAGGTACCTCTACCGAACCGTCTGA | |
| | SEGSAPGTSTEPSEG | | GGGCAGCGCACCAGGTACTTCTACCG | |
| | SAPGTSESATPESGP | | AACCGTCCGAGGGTAGCGCACCAGGT | |
| | GTSESATPESGPGSP | | AGCCCAGCAGGTTCTCCTACCTCCACC | |
| | AGSPTSTEEGTSESA | | GAGGAAGGTACTTCTACCGAACCGTC | |
| | TPESGPGSEPATSGS | | CGAGGGTAGCGCACCAGGTACCTCTA | |
| | ETPGTSESATPESGP | | CTGAACCTTCTGAGGGCAGCGCTCCA | |
| | GTSTEPSEGSAPGTS | | GGTACTTCTGAAAGCGCTACCCCGGA | |
| | TEPSEGSAPGTSTEPS | | GTCCGGTCCAGGTACTTCTACTGAACC | |
| | EGSAPGTSTEPSEGS | | GTCCGAAGGTAGCGCACCAGGTACTT | |
| | APGTSTEPSEGSAPG | | CTGAAAGCGCAACCCCTGAATCCGGT | |
| | TSTEPSEGSAPGSPA | | CCAGGTAGCGAACCGGCTACTTCTGG | |
| | GSPTSTEEGTSTEPSE | | CTCTGAGACTCCAGGTACTTCTACCGA | |
| | GSAPGTSESATPESG | | ACCGTCCGAAGGTAGCGCACCAGGTA | |
| | PGSEPATSGSETPGT | | CTTCTACTGAACCGTCTGAAGGTAGC | |
| | SESATPESGPGSEPA | | GCACCAGGTACTTCTGAAAGCGCAAC | |
| | TSGSETPGTSESATPE | | CCCGGAATCCGGCCCAGGTACCTCTG | |
| | SGPGTSTEPSEGSAP | | AAAGCGCAACCCCGGAGTCCGGCCCA | |
| | GTSESATPESGPGSP | | GGTAGCCCTGCTGGCTCTCCAACCTCC | |
| | AGSPTSTEEGSPAGS | | ACCGAAGAAGGTACCTCTGAAAGCGC | |
| | PTSTEEGSPAGSPTST | | AACCCCTGAATCCGGCCCAGGTAGCG | |
| | EEGTSESATPESGPG | | AACCGGCAACCTCCGGTTCTGAAACC | |
| | TSTEPSEGSAPGTSES | | CCAGGTACCTCTGAAAGCGCTACTCC | |
| | ATPESGPGSEPATSG | | GGAGTCTGGCCCAGGTACCTCTACTG | |
| | SETPGTSESATPESGP | | AACCGTCTGAGGGTAGCGCTCCAGGT | |
| | GSEPATSGSETPGTS | | ACTTCTACTGAACCGTCCGAAGGTAG | |
| | ESATPESGPGTSTEPS | | CGCACCAGGTACTTCTACCGAACCGT | |
| | EGSAPGSPAGSPTST | | CCGAAGGCAGCGCTCCAGGTACCTCT | |
| | EEGTSESATPESGPG | | ACTGAACCTTCCGAGGGCAGCGCTCC | |
| | SEPATSGSETPGTSES | | AGGTACCTCTACCGAACCTTCTGAAG | |
| | ATPESGPGSPAGSPT | | GTAGCGCACCAGGTACTTCTACCGAA | |
| | STEEGSPAGSPTSTEE | | CCGTCCGAGGGTAGCGCACCAGGTAG | |
| | GTSTEPSEGSAPGTS | | CCCAGCAGGTTCTCCTACCTCCACCGA | |
| | ESATPESGPGTSESA | | GGAAGGTACTTCTACCGAACCGTCCG | |
| | TPESGPGTSESATPES | | AGGGTAGCGCACCAGGTACCTCTGAA | |
| | GPGSEPATSGSETPG | | AGCGCAACTCCTGAGTCTGGCCCAGG | |
| | SEPATSGSETPGSPA | | TAGCGAACCTGCTACCTCCGGCTCTG | |
| | GSPTSTEEGTSTEPSE | | AGACTCCAGGTACCTCTGAAAGCGCA | |
| | GSAPGTSTEPSEGSA | | ACCCCGGAATCTGGTCCAGGTAGCGA | |
| | PGSEPATSGSETPGT | | ACCTGCAACCTCTGGCTCTGAAACCC | |
| | SESATPESGPGTSTEP | | CAGGTACCTCTGAAAGCGCTACTCCT | |
| | SEGSAPGFPTIPLSRL | | GAATCTGGCCCAGGTACTTCTACTGA | |
| | FDNAMLRAHRLHQL | | ACCGTCCGAGGGCAGCGCACCAGGTA | |
| | AFDTYQEFEEAYIPK | | CTTCTGAAAGCGCTACTCCTGAGTCCG | |
| | EQKYSFLQNPQTSLC | | GCCCAGGTAGCCCGGCTGGCTCTCCG | |
| | FSESIPTPSNREETQQ | | ACTTCCACCGAGGAAGGTAGCCCGGC | |
| | KSNLELLRISLLLIQS | | TGGCTCTCCAACTTCTACTGAAGAAG | |
| | WLEPVQFLRSVFAN | | GTAGCCCGGCAGGCTCTCCGACCTCT | |
| | SLVYGASDSNVYDL | | ACTGAGGAAGGTACTTCTGAAAGCGC | |
| | LKDLEEGIQTLMGRL | | AACCCCGGAGTCCGGCCCAGGTACCT | |
| | EDGSPRTGQIFKQTY | | CTACCGAACCGTCTGAGGGCAGCGCA | |
| | SKFDTNSHNDDALL | | CCAGGTACCTCTGAAAGCGCAACTCC | |
| | KNYGLLYCFRKDMD | | TGAGTCTGGCCCAGGTAGCGAACCTG | |
| | KVETFLRIVQCRSVE | | CTACCTCCGGCTCTGAGACTCCAGGT | |
| | GSCGFGGSEPATSGS | | ACCTCTGAAAGCGCAACCCCGGAATC | |
| | ETPGTSESATPESGP | | TGGTCCAGGTAGCGAACCTGCAACCT | |
| | GSEPATSGSETPGSP | | CTGGCTCTGAAACCCCAGGTACCTCT | |
| | AGSPTSTEEGTSTEPS | | GAAAGCGCTACTCCTGAATCTGGCCC | |
| | EGSAPGSEPATSGSE | | AGGTACTTCTACTGAACCGTCCGAGG | |
| | TPGSEPATSGSETPG | | GCAGCGCACCAGGTAGCCCTGCTGGC | |
| | SEPATSGSETPGTSTE | | TCTCCAACCTCCACCGAAGAAGGTAC | |
| | PSEGSAPGTSESATP | | CTCTGAAAGCGCAACCCCTGAATCCG | |
| | ESGPGSEPATSGSET | | GCCCAGGTAGCGAACCGGCAACCTCC | |
| | PGTSTEPSEGSAP | | GGTTCTGAAACCCCAGGTACTTCTGA | |
| | | | AAGCGCTACTCCTGAGTCCGGCCCAG | |
| | | | GTAGCCCGGCTGGCTCTCCGACTTCCA | |
| | | | CCGAGGAAGGTAGCCCGGCTGGCTCT | |
| | | | CCAACTTCTACTGAAGAAGGTACTTCT | |
| | | | ACCGAACCTTCCGAGGGCAGCGCACC | |
| | | | AGGTACTTCTGAAAGCGCTACCCCTG | |
| | | | AGTCCGGCCCAGGTACTTCTGAAAGC | |
| | | | GCTACTCCTGAATCCGGTCCAGGTACT | |
| | | | TCTGAAAGCGCTACCCCGGAATCTGG | |
| | | | CCCAGGTAGCGAACCGGCTACTTCTG | |
| | | | GTTCTGAAACCCCAGGTAGCGAACCG | |
| | | | GCTACCTCCGGTTCTGAAACTCCAGGT | |
| | | | AGCCCAGCAGGCTCTCCGACTTCCAC | |
| | | | TGAGGAAGGTACTTCTACTGAACCTT | |
| | | | CCGAAGGCAGCGCACCAGGTACCTCT | |
| | | | ACTGAACCTTCTGAGGGCAGCGCTCC | |
| | | | AGGTAGCGAACCTGCAACCTCTGGCT | |
| | | | CTGAAACCCCAGGTACCTCTGAAAGC | |
| | | | GCTACTCCTGAATCTGGCCCAGGTACT | |
| | | | TCTACTGAACCGTCCGAGGGCAGCGC | |
| | | | ACCAGGTTTTCCGACTATTCCGCTGTC | |
| | | | TCGTCTGTTTGATAATGCTATGCTGCG | |
| | | | TGCGCACCGTCTGCACCAGCTGGCCTT | |
| | | | TGATACTTACCAGGAATTTGAAGAAG | |
| | | | CcTACATTCCTAAAGAGCAGAAGTACT | |
| | | | CTTTCCTGCAAAACCCACAGACTTCTC | |
| | | | TCTGCTTCAGCGAATCTATTCCGACGC | |
| | | | CTTCCAATCGCGAGGAAACTCAGCAA | |
| | | | AAGTCCAATCTGGAACTACTCCGCAT | |
| | | | TTCTCTGCTTCTGATTCAGAGCTGGCT | |
| | | | AGAACCAGTGCAATTTCTGCGTTCCGT | |
| | | | CTTCGCCAATAGCCTAGTTTATGGCGC | |
| | | | ATCCGACAGCAACGTATACGATCTCC | |
| | | | TGAAAGATCTCGAGGAAGGCATTCAG | |
| | | | ACCCTGATGGGTCGTCTCGAGGATGG | |
| | | | CTCTCCGCGTACTGGTCAGATCTTCAA | |
| | | | GCAGACTTACTCTAAATTTGATACTAA | |
| | | | CAGCCACAATGACGATGCGCTTCTAA | |
| | | | AAAACTATGGTCTGCTGTATTGTTTTC | |
| | | | GTAAAGATATGGACAAAGTTGAAACC | |
| | | | TTCCTGCGTATTGTTCAGTGTCGTTCC | |
| | | | GTTGAGGGCAGCTGTGGTTTCTAAGG | |
| | | | TGGTAGCGAACCGGCAACTTCCGGCT | |
| | | | CTGAAACCCCAGGTACTTCTGAAAGC | |
| | | | GCTACTCCTGAGTCTGGCCCAGGTAG | |
| | | | CGAACCTGCTACCTCTGGCTCTGAAA | |
| | | | CCCCAGGTAGCCCGGCAGGCTCTCCG | |
| | | | ACTTCCACCGAGGAAGGTACCTCTAC | |
| | | | TGAACCTTCTGAGGGTAGCGCTCCAG | |
| | | | GTAGCGAACCGGCAACCTCTGGCTCT | |
| | | | GAAACCCCAGGTAGCGAACCTGCTAC | |
| | | | CTCCGGCTCTGAAACTCCAGGTAGCG | |
| | | | AACCGGCTACTTCCGGTTCTGAAACTC | |
| | | | CAGGTACCTCTACCGAACCTTCCGAA | |
| | | | GGCAGCGCACCAGGTACTTCTGAAAG | |
| | | | CGCAACCCCTGAATCCGGTCCAGGTA | |
| | | | GCGAACCGGCTACTTCTGGCTCTGAG | |
| | | | ACTCCAGGTACTTCTACCGAACCGTCC | |
| | | | GAAGGTAGCGCACCA | |
| AF864- | GSTSESPSGTAPGTSP | 751 | GGTTCTACCAGCGAATCTCCTTCTGGC | 752 |
| hGH- | SGESSTAPGSTSESPS | | ACCGCTCCAGGTACCTCTCCTAGCGG | |
| AE144 | GTAPGSTSESPSGTA | | CGAATCTTCTACCGCTCCAGGTTCTAC | |
| | PGTSTPESGSASPGTS | | TAGCGAATCTCCTTCTGGCACTGCACC | |
| | TPESGSASPGSTSESP | | AGGTTCTACTAGCGAATCCCCGTCTG | |
| | SGTAPGSTSESPSGT | | GTACTGCTCCAGGTACTTCTACTCCTG | |
| | APGTSPSGESSTAPG | | AAAGCGGTTCCGCTTCTCCAGGTACCT | |
| | STSESPSGTAPGTSPS | | CTACTCCGGAAAGCGGTTCTGCATCTC | |
| | GESSTAPGTSPSGESS | | CAGGTTCTACCAGCGAATCTCCTTCTG | |
| | TAPGSTSSTAESPGP | | GCACCGCTCCAGGTTCTACTAGCGAA | |
| | GTSPSGESSTAPGTSP | | TCCCCGTCTGGTACCGCACCAGGTACT | |
| | SGESSTAPGSTSSTA | | TCTCCTAGCGGCGAATCTTCTACCGCA | |
| | ESPGPGTSTPESGSAS | | CCAGGTTCTACTAGCGAATCTCCGTCT | |
| | PGTSTPESGSASPGST | | GGCACTGCTCCAGGTACTTCTCCTAGC | |
| | SESPSGTAPGSTSESP | | GGTGAATCTTCTACCGCTCCAGGTACT | |
| | SGTAPGTSTPESGSA | | TCCCCTAGCGGCGAATCTTCTACCGCT | |
| | SPGSTSSTAESPGPGT | | CCAGGTTCTACTAGCTCTACTGCAGA | |
| | STPESGSASPGSTSES | | ATCTCCGGGCCCAGGTACCTCTCCTAG | |
| | PSGTAPGTSPSGESST | | CGGTGAATCTTCTACCGCTCCAGGTAC | |
| | APGSTSSTAESPGPG | | TTCTCCGAGCGGTGAATCTTCTACCGC | |
| | TSPSGESSTAPGTSTP | | TCCAGGTTCTACTAGCTCTACTGCAGA | |
| | ESGSASPGSTSSTAES | | ATCTCCTGGCCCAGGTACCTCTACTCC | |
| | PGPGSTSSTAESPGP | | GGAAAGCGGCTCTGCATCTCCAGGTA | |
| | GSTSSTAESPGPGSTS | | CTTCTACCCCTGAAAGCGGTTCTGCAT | |
| | STAESPGPGTSPSGES | | CTCCAGGTTCTACTAGCGAATCTCCTT | |
| | STAPGSTSESPSGTAP | | CTGGCACTGCACCAGGTTCTACCAGC | |
| | GSTSESPSGTAPGTS | | GAATCTCCGTCTGGCACTGCACCAGG | |
| | TPESGPXXXGASASG | | TACCTCTACCCCTGAAAGCGGTTCCGC | |
| | APSTXXXXSESPSGT | | TTCTCCAGGTTCTACCAGCTCTACCGC | |
| | APGSTSESPSGTAPG | | AGAATCTCCTGGTCCAGGTACCTCTAC | |
| | STSESPSGTAPGSTSE | | TCCGGAAAGCGGCTCTGCATCTCCAG | |
| | SPSGTAPGSTSESPSG | | GTTCTACTAGCGAATCTCCTTCTGGCA | |
| | TAPGSTSESPSGTAP | | CTGCACCAGGTACTTCTCCGAGCGGT | |
| | GTSTPESGSASPGTSP | | GAATCTTCTACCGCACCAGGTTCTACT | |
| | SGESSTAPGTSPSGES | | AGCTCTACCGCTGAATCTCCGGGCCC | |
| | STAPGSTSSTAESPGP | | AGGTACTTCTCCGAGCGGTGAATCTTC | |
| | GTSPSGESSTAPGTS | | TACTGCTCCAGGTACCTCTACTCCTGA | |
| | TPESGSASPGSTSESP | | AAGCGGTTCTGCATCTCCAGGTTCCAC | |
| | SGTAPGSTSESPSGT | | TAGCTCTACCGCAGAATCTCCGGGCC | |
| | APGTSPSGESSTAPG | | CAGGTTCTACTAGCTCTACTGCTGAAT | |
| | STSESPSGTAPGTSTP | | CTCCTGGCCCAGGTTCTACTAGCTCTA | |
| | ESGSASPGTSTPESGS | | CTGCTGAATCTCCGGGTCCAGGTTCTA | |
| | ASPGSTSESPSGTAP | | CCAGCTCTACTGCTGAATCTCCTGGTC | |
| | GTSTPESGSASPGSTS | | CAGGTACCTCCCCGAGCGGTGAATCT | |
| | STAESPGPGSTSESPS | | TCTACTGCACCAGGTTCTACTAGCGA | |
| | GTAPGSTSESPSGTA | | ATCTCCTTCTGGCACTGCACCAGGTTC | |
| | PGTSPSGESSTAPGST | | TACCAGCGAATCTCCGTCTGGCACTG | |
| | SSTAESPGPGTSPSGE | | CACCAGGTACCTCTACCCCTGAAAGC | |
| | SSTAPGTSTPESGSAS | | GGTCCXXXXXXXXXXXXTGCAAGCG | |
| | PGTSPSGESSTAPGTS | | CAAGCGGCGCGCCAAGCACGGGAXX | |
| | PSGESSTAPGTSPSGE | | XXXXXXTAGCGAATCTCCTTCTGGTA | |
| | SSTAPGSTSSTAESPG | | CCGCTCCAGGTTCTACCAGCGAATCC | |
| | PGSTSSTAESPGPGTS | | CCGTCTGGTACTGCTCCAGGTTCTACC | |
| | PSGESSTAPGSSPSAS | | AGCGAATCTCCTTCTGGTACTGCACCA | |
| | TGTGPGSSTPSGATG | | GGTTCTACTAGCGAATCTCCTTCTGGT | |
| | SPGSSTPSGATGSPG | | ACCGCTCCAGGTTCTACCAGCGAATC | |
| | FPTIPLSRLFDNAML | | CCCGTCTGGTACTGCTCCAGGTTCTAC | |
| | RAHRLHQLAFDTYQ | | CAGCGAATCTCCTTCTGGTACTGCACC | |
| | EFEEAYIPKEQKYSF | | AGGTACTTCTACTCCGGAAAGCGGTT | |
| | LQNPQTSLCFSESIPT | | CCGCATCTCCAGGTACTTCTCCTAGCG | |
| | PSNREETQQKSNLEL | | GTGAATCTTCTACTGCTCCAGGTACCT | |
| | LRISLLLIQSWLEPVQ | | CTCCTAGCGGCGAATCTTCTACTGCTC | |
| | FLRSVFANSLVYGAS | | CAGGTTCTACCAGCTCTACTGCTGAAT | |
| | DSNVYDLLKDLEEGI | | CTCCGGGTCCAGGTACTTCCCCGAGC | |
| | QTLMGRLEDGSPRT | | GGTGAATCTTCTACTGCACCAGGTACT | |
| | GQIFKQTYSKFDTNS | | TCTACTCCGGAAAGCGGTTCCGCTTCT | |
| | HNDDALLKNYGLLY | | CCAGGTTCTACCAGCGAATCTCCTTCT | |
| | CFRKDMDKVETFLRI | | GGCACCGCTCCAGGTTCTACTAGCGA | |
| | VQCRSVEGSCGFGG | | ATCCCCGTCTGGTACCGCACCAGGTA | |
| | SEPATSGSETPGTSES | | CTTCTCCTAGCGGCGAATCTTCTACCG | |
| | ATPESGPGSEPATSG | | CACCAGGTTCTACTAGCGAATCCCCG | |
| | SETPGSPAGSPTSTEE | | TCTGGTACCGCACCAGGTACTTCTACC | |
| | GTSTEPSEGSAPGSE | | CCGGAAAGCGGCTCTGCTTCTCCAGG | |
| | PATSGSETPGSEPAT | | TACTTCTACCCCGGAAAGCGGCTCCG | |
| | SGSETPGSEPATSGS | | CATCTCCAGGTTCTACTAGCGAATCTC | |
| | ETPGTSTEPSEGSAP | | CTTCTGGTACCGCTCCAGGTACTTCTA | |
| | GTSESATPESGPGSE | | CCCCTGAAAGCGGCTCCGCTTCTCCA | |
| | PATSGSETPGTSTEPS | | GGTTCCACTAGCTCTACCGCTGAATCT | |
| | EGSAP | | CCGGGTCCAGGTTCTACCAGCGAATC | |
| | | | TCCTTCTGGCACCGCTCCAGGTTCTAC | |
| | | | TAGCGAATCCCCGTCTGGTACCGCAC | |
| | | | CAGGTACTTCTCCTAGCGGCGAATCTT | |
| | | | CTACCGCACCAGGTTCTACCAGCTCTA | |
| | | | CTGCTGAATCTCCGGGTCCAGGTACTT | |
| | | | CCCCGAGCGGTGAATCTTCTACTGCA | |
| | | | CCAGGTACTTCTACTCCGGAAAGCGG | |
| | | | TTCCGCTTCTCCAGGTACCTCCCCTAG | |
| | | | CGGCGAATCTTCTACTGCTCCAGGTAC | |
| | | | CTCTCCTAGCGGCGAATCTTCTACCGC | |
| | | | TCCAGGTACCTCCCCTAGCGGTGAAT | |
| | | | CTTCTACCGCACCAGGTTCTACTAGCT | |
| | | | CTACTGCTGAATCTCCGGGTCCAGGTT | |
| | | | CTACCAGCTCTACTGCTGAATCTCCTG | |
| | | | GTCCAGGTACCTCCCCGAGCGGTGAA | |
| | | | TCTTCTACTGCACCAGGTTCTAGCCCT | |
| | | | TCTGCTTCCACCGGTACCGGCCCAGGT | |
| | | | AGCTCTACTCCGTCTGGTGCAACTGGC | |
| | | | TCTCCAGGTAGCTCTACTCCGTCTGGT | |
| | | | GCAACCGGCTCCCCAGGTTTTCCGACT | |
| | | | ATTCCGCTGTCTCGTCTGTTTGATAAT | |
| | | | GCTATGCTGCGTGCGCACCGTCTGCA | |
| | | | CCAGCTGGCCTTTGATACTTACCAGG | |
| | | | AATTTGAAGAAGCcTACATTCCTAAAG | |
| | | | AGCAGAAGTACTCTTTCCTGCAAAAC | |
| | | | CCACAGACTTCTCTCTGCTTCAGCGAA | |
| | | | TCTATTCCGACGCCTTCCAATCGCGAG | |
| | | | GAAACTCAGCAAAAGTCCAATCTGGA | |
| | | | ACTACTCCGCATTTCTCTGCTTCTGAT | |
| | | | TCAGAGCTGGCTAGAACCAGTGCAAT | |
| | | | TTCTGCGTTCCGTCTTCGCCAATAGCC | |
| | | | TAGTTTATGGCGCATCCGACAGCAAC | |
| | | | GTATACGATCTCCTGAAAGATCTCGA | |
| | | | GGAAGGCATTCAGACCCTGATGGGTC | |
| | | | GTCTCGAGGATGGCTCTCCGCGTACT | |
| | | | GGTCAGATCTTCAAGCAGACTTACTCT | |
| | | | AAATTTGATACTAACAGCCACAATGA | |
| | | | CGATGCGCTTCTAAAAAACTATGGTC | |
| | | | TGCTGTATTGTTTTCGTAAAGATATGG | |
| | | | ACAAAGTTGAAACCTTCCTGCGTATT | |
| | | | GTTCAGTGTCGTTCCGTTGAGGGCAG | |
| | | | CTGTGGTTTCTAAGGTGGTAGCGAAC | |
| | | | CGGCAACTTCCGGCTCTGAAACCCCA | |
| | | | GGTACTTCTGAAAGCGCTACTCCTGA | |
| | | | GTCTGGCCCAGGTAGCGAACCTGCTA | |
| | | | CCTCTGGCTCTGAAACCCCAGGTAGC | |
| | | | CCGGCAGGCTCTCCGACTTCCACCGA | |
| | | | GGAAGGTACCTCTACTGAACCTTCTG | |
| | | | AGGGTAGCGCTCCAGGTAGCGAACCG | |
| | | | GCAACCTCTGGCTCTGAAACCCCAGG | |
| | | | TAGCGAACCTGCTACCTCCGGCTCTG | |
| | | | AAACTCCAGGTAGCGAACCGGCTACT | |
| | | | TCCGGTTCTGAAACTCCAGGTACCTCT | |
| | | | ACCGAACCTTCCGAAGGCAGCGCACC | |
| | | | AGGTACTTCTGAAAGCGCAACCCCTG | |
| | | | AATCCGGTCCAGGTAGCGAACCGGCT | |
| | | | ACTTCTGGCTCTGAGACTCCAGGTACT | |
| | | | TCTACCGAACCGTCCGAAGGTAGCGC | |
| | | | ACCA | |
| AG864- | GASPGTSSTGSPGSS | 753 | GGTGCTTCCCCGGGCACCAGCTCTACT | 754 |
| hGH- | PSASTGTGPGSSPSA | | GGTTCTCCAGGTTCTAGCCCGTCTGCT | |
| AE144 | STGTGPGTPGSGTAS | | TCTACTGGTACTGGTCCAGGTTCTAGC | |
| | SSPGSSTPSGATGSP | | CCTTCTGCTTCCACTGGTACTGGTCCA | |
| | GSNPSASTGTGPGAS | | GGTACCCCGGGTAGCGGTACCGCTTC | |
| | PGTSSTGSPGTPGSG | | TTCTTCTCCAGGTAGCTCTACTCCGTC | |
| | TASSSPGSSTPSGAT | | TGGTGCTACCGGCTCTCCAGGTTCTAA | |
| | GSPGTPGSGTASSSP | | CCCTTCTGCATCCACCGGTACCGGCCC | |
| | GASPGTSSTGSPGAS | | AGGTGCTTCTCCGGGCACCAGCTCTA | |
| | PGTSSTGSPGTPGSG | | CTGGTTCTCCAGGTACCCCGGGCAGC | |
| | TASSSPGSSTPSGAT | | GGTACCGCATCTTCTTCTCCAGGTAGC | |
| | GSPGASPGTSSTGSP | | TCTACTCCTTCTGGTGCAACTGGTTCT | |
| | GTPGSGTASSSPGSS | | CCAGGTACTCCTGGCAGCGGTACCGC | |
| | TPSGATGSPGSNPSA | | TTCTTCTTCTCCAGGTGCTTCTCCTGG | |
| | STGTGPGSSPSASTG | | TACTAGCTCTACTGGTTCTCCAGGTGC | |
| | TGPGSSTPSGATGSP | | TTCTCCGGGCACTAGCTCTACTGGTTC | |
| | GSSTPSGATGSPGAS | | TCCAGGTACCCCGGGTAGCGGTACTG | |
| | PGTSSTGSPGASPGT | | CTTCTTCCTCTCCAGGTAGCTCTACCC | |
| | SSTGSPGASPGTSST | | CTTCTGGTGCAACCGGCTCTCCAGGTG | |
| | GSPGTPGSGTASSSP | | CTTCTCCGGGCACCAGCTCTACCGGTT | |
| | GASPGTSSTGSPGAS | | CTCCAGGTACCCCGGGTAGCGGTACC | |
| | PGTSSTGSPGASPGT | | GCTTCTTCTTCTCCAGGTAGCTCTACT | |
| | SSTGSPGSSPSASTGT | | CCGTCTGGTGCTACCGGCTCTCCAGGT | |
| | GPGTPGSGTASSSPG | | TCTAACCCTTCTGCATCCACCGGTACC | |
| | ASPGTSSTGSPGASP | | GGCCCAGGTTCTAGCCCTTCTGCTTCC | |
| | GTSSTGSPGASPGTS | | ACCGGTACTGGCCCAGGTAGCTCTAC | |
| | STGSPGSSTPSGATG | | CCCTTCTGGTGCTACCGGCTCCCCAGG | |
| | SPGSSTPSGATGSPG | | TAGCTCTACTCCTTCTGGTGCAACTGG | |
| | ASPGTSSTGSPGTPG | | CTCTCCAGGTGCATCTCCGGGCACTA | |
| | SGTASSSPGSSTPSG | | GCTCTACTGGTTCTCCAGGTGCATCCC | |
| | ATGSPGSSTPSGATG | | CTGGCACTAGCTCTACTGGTTCTCCAG | |
| | SPGSSTPSGATGSPG | | GTGCTTCTCCTGGTACCAGCTCTACTG | |
| | SSPSASTGTGPGASP | | GTTCTCCAGGTACTCCTGGCAGCGGT | |
| | GTSSTGSPGASPGTS | | ACCGCTTCTTCTTCTCCAGGTGCTTCT | |
| | STGSPGTPGSGTASS | | CCTGGTACTAGCTCTACTGGTTCTCCA | |
| | SPGASPGTSSTGSPG | | GGTGCTTCTCCGGGCACTAGCTCTACT | |
| | ASPGTSSTGSPGASP | | GGTTCTCCAGGTGCTTCCCCGGGCACT | |
| | GTSSTGSPGASPGTS | | AGCTCTACCGGTTCTCCAGGTTCTAGC | |
| | STGSPGTPGSGTASS | | CCTTCTGCATCTACTGGTACTGGCCCA | |
| | SPGSSTPSGATGSPG | | GGTACTCCGGGCAGCGGTACTGCTTC | |
| | TPGSGTASSSPGSSTP | | TTCCTCTCCAGGTGCATCTCCGGGCAC | |
| | SGATGSPGTPGSGTA | | TAGCTCTACTGGTTCTCCAGGTGCATC | |
| | SSSPGSSTPSGATGSP | | CCCTGGCACTAGCTCTACTGGTTCTCC | |
| | GSSTPSGATGSPGSS | | AGGTGCTTCTCCTGGTACCAGCTCTAC | |
| | PSASTGTGPGSSPSA | | TGGTTCTCCAGGTAGCTCTACTCCGTC | |
| | STGTGPGASPGTSST | | TGGTGCAACCGGTTCCCCAGGTAGCT | |
| | GSPGTPGSGTASSSP | | CTACTCCTTCTGGTGCTACTGGCTCCC | |
| | GSSTPSGATGSPGSS | | CAGGTGCATCCCCTGGCACCAGCTCT | |
| | PSASTGTGPGSSPSA | | ACCGGTTCTCCAGGTACCCCGGGCAG | |
| | STGTGPGASPGTSST | | CGGTACCGCATCTTCCTCTCCAGGTAG | |
| | GSPGASPGTSSTGSP | | CTCTACCCCGTCTGGTGCTACCGGTTC | |
| | GSSTPSGATGSPGSS | | CCCAGGTAGCTCTACCCCGTCTGGTGC | |
| | PSASTGTGPGASPGT | | AACCGGCTCCCCAGGTAGCTCTACTC | |
| | SSTGSPGSSPSASTGT | | CGTCTGGTGCAACCGGCTCCCCAGGT | |
| | GPGTPGSGTASSSPG | | TCTAGCCCGTCTGCTTCCACTGGTACT | |
| | SSTPSGATGSPGSSTP | | GGCCCAGGTGCTTCCCCGGGCACCAG | |
| | SGATGSPGASPGTSS | | CTCTACTGGTTCTCCAGGTGCATCCCC | |
| | TGSPGFPTIPLSRLFD | | GGGTACCAGCTCTACCGGTTCTCCAG | |
| | NAMLRAHRLHQLAF | | GTACTCCTGGCAGCGGTACTGCATCTT | |
| | DTYQEFEEAYIPKEQ | | CCTCTCCAGGTGCTTCTCCGGGCACCA | |
| | KYSFLQNPQTSLCFS | | GCTCTACTGGTTCTCCAGGTGCATCTC | |
| | ESIPTPSNREETQQKS | | CGGGCACTAGCTCTACTGGTTCTCCAG | |
| | NLELLRISLLLIQSWL | | GTGCATCCCCTGGCACTAGCTCTACTG | |
| | EPVQFLRSVFANSLV | | GTTCTCCAGGTGCTTCTCCTGGTACCA | |
| | YGASDSNVYDLLKD | | GCTCTACTGGTTCTCCAGGTACCCCTG | |
| | LEEGIQTLMGRLEDG | | GTAGCGGTACTGCTTCTTCCTCTCCAG | |
| | SPRTGQIFKQTYSKF | | GTAGCTCTACTCCGTCTGGTGCTACCG | |
| | DTNSHNDDALLKNY | | GTTCTCCAGGTACCCCGGGTAGCGGT | |
| | GLLYCFRKDMDKVE | | ACCGCATCTTCTTCTCCAGGTAGCTCT | |
| | TFLRIVQCRSVEGSC | | ACCCCGTCTGGTGCTACTGGTTCTCCA | |
| | GFGGSEPATSGSETP | | GGTACTCCGGGCAGCGGTACTGCTTC | |
| | GTSESATPESGPGSE | | TTCCTCTCCAGGTAGCTCTACCCCTTC | |
| | PATSGSETPGSPAGS | | TGGTGCTACTGGCTCTCCAGGTAGCTC | |
| | PTSTEEGTSTEPSEGS | | TACCCCGTCTGGTGCTACTGGCTCCCC | |
| | APGSEPATSGSETPG | | AGGTTCTAGCCCTTCTGCATCCACCGG | |
| | SEPATSGSETPGSEP | | TACCGGTCCAGGTTCTAGCCCGTCTGC | |
| | ATSGSETPGTSTEPSE | | ATCTACTGGTACTGGTCCAGGTGCATC | |
| | GSAPGTSESATPESG | | CCCGGGCACTAGCTCTACCGGTTCTCC | |
| | PGSEPATSGSETPGT | | AGGTACTCCTGGTAGCGGTACTGCTTC | |
| | STEPSEGSAP | | TTCTTCTCCAGGTAGCTCTACTCCTTC | |
| | | | TGGTGCTACTGGTTCTCCAGGTTCTAG | |
| | | | CCCTTCTGCATCCACCGGTACCGGCCC | |
| | | | AGGTTCTAGCCCGTCTGCTTCTACCGG | |
| | | | TACTGGTCCAGGTGCTTCTCCGGGTAC | |
| | | | TAGCTCTACTGGTTCTCCAGGTGCATC | |
| | | | TCCTGGTACTAGCTCTACTGGTTCTCC | |
| | | | AGGTAGCTCTACTCCGTCTGGTGCAA | |
| | | | CCGGCTCTCCAGGTTCTAGCCCTTCTG | |
| | | | CATCTACCGGTACTGGTCCAGGTGCA | |
| | | | TCCCCTGGTACCAGCTCTACCGGTTCT | |
| | | | CCAGGTTCTAGCCCTTCTGCTTCTACC | |
| | | | GGTACCGGTCCAGGTACCCCTGGCAG | |
| | | | CGGTACCGCATCTTCCTCTCCAGGTAG | |
| | | | CTCTACTCCGTCTGGTGCAACCGGTTC | |
| | | | CCCAGGTAGCTCTACTCCTTCTGGTGC | |
| | | | TACTGGCTCCCCAGGTGCATCCCCTGG | |
| | | | CACCAGCTCTACCGGTTCTCCAGGTTT | |
| | | | TCCGACTATTCCGCTGTCTCGTCTGTT | |
| | | | TGATAATGCTATGCTGCGTGCGCACC | |
| | | | GTCTGCACCAGCTGGCCTTTGATACTT | |
| | | | ACCAGGAATTTGAAGAAGCcTACATT | |
| | | | CCTAAAGAGCAGAAGTACTCTTTCCT | |
| | | | GCAAAACCCACAGACTTCTCTCTGCTT | |
| | | | CAGCGAATCTATTCCGACGCCTTCCA | |
| | | | ATCGCGAGGAAACTCAGCAAAAGTCC | |
| | | | AATCTGGAACTACTCCGCATTTCTCTG | |
| | | | CTTCTGATTCAGAGCTGGCTAGAACC | |
| | | | AGTGCAATTTCTGCGTTCCGTCTTCGC | |
| | | | CAATAGCCTAGTTTATGGCGCATCCG | |
| | | | ACAGCAACGTATACGATCTCCTGAAA | |
| | | | GATCTCGAGGAAGGCATTCAGACCCT | |
| | | | GATGGGTCGTCTCGAGGATGGCTCTC | |
| | | | CGCGTACTGGTCAGATCTTCAAGCAG | |
| | | | ACTTACTCTAAATTTGATACTAACAGC | |
| | | | CACAATGACGATGCGCTTCTAAAAAA | |
| | | | CTATGGTCTGCTGTATTGTTTTCGTAA | |
| | | | AGATATGGACAAAGTTGAAACCTTCC | |
| | | | TGCGTATTGTTCAGTGTCGTTCCGTTG | |
| | | | AGGGCAGCTGTGGTTTCTAAGGTGGT | |
| | | | AGCGAACCGGCAACTTCCGGCTCTGA | |
| | | | AACCCCAGGTACTTCTGAAAGCGCTA | |
| | | | CTCCTGAGTCTGGCCCAGGTAGCGAA | |
| | | | CCTGCTACCTCTGGCTCTGAAACCCCA | |
| | | | GGTAGCCCGGCAGGCTCTCCGACTTC | |
| | | | CACCGAGGAAGGTACCTCTACTGAAC | |
| | | | CTTCTGAGGGTAGCGCTCCAGGTAGC | |
| | | | GAACCGGCAACCTCTGGCTCTGAAAC | |
| | | | CCCAGGTAGCGAACCTGCTACCTCCG | |
| | | | GCTCTGAAACTCCAGGTAGCGAACCG | |
| | | | GCTACTTCCGGTTCTGAAACTCCAGGT | |
| | | | ACCTCTACCGAACCTTCCGAAGGCAG | |
| | | | CGCACCAGGTACTTCTGAAAGCGCAA | |
| | | | CCCCTGAATCCGGTCCAGGTAGCGAA | |
| | | | CCGGCTACTTCTGGCTCTGAGACTCCA | |
| | | | GGTACTTCTACCGAACCGTCCGAAGG | |
| | | | TAGCGCACCA | |
| AM875- | GTSTEPSEGSAPGSE | 755 | GGTACTTCTACTGAACCGTCTGAAGG | 756 |
| hGH- | PATSGSETPGSPAGS | | CAGCGCACCAGGTAGCGAACCGGCTA | |
| AE144 | PTSTEEGSTSSTAESP | | CTTCCGGTTCTGAAACCCCAGGTAGC | |
| | GPGTSTPESGSASPG | | CCAGCAGGTTCTCCAACTTCTACTGAA | |
| | STSESPSGTAPGSTSE | | GAAGGTTCTACCAGCTCTACCGCAGA | |
| | SPSGTAPGTSTPESGS | | ATCTCCTGGTCCAGGTACCTCTACTCC | |
| | ASPGTSTPESGSASP | | GGAAAGCGGCTCTGCATCTCCAGGTT | |
| | GSEPATSGSETPGTS | | CTACTAGCGAATCTCCTTCTGGCACTG | |
| | ESATPESGPGSPAGS | | CACCAGGTTCTACTAGCGAATCCCCG | |
| | PTSTEEGTSTEPSEGS | | TCTGGTACTGCTCCAGGTACTTCTACT | |
| | APGTSESATPESGPG | | CCTGAAAGCGGTTCCGCTTCTCCAGGT | |
| | TSTEPSEGSAPGTSTE | | ACCTCTACTCCGGAAAGCGGTTCTGC | |
| | PSEGSAPGSPAGSPT | | ATCTCCAGGTAGCGAACCGGCAACCT | |
| | STEEGTSTEPSEGSAP | | CCGGCTCTGAAACCCCAGGTACCTCT | |
| | GTSTEPSEGSAPGTS | | GAAAGCGCTACTCCTGAATCCGGCCC | |
| | ESATPESGPGTSESA | | AGGTAGCCCGGCAGGTTCTCCGACTT | |
| | TPESGPGTSTEPSEGS | | CCACTGAGGAAGGTACCTCTACTGAA | |
| | APGTSTEPSEGSAPG | | CCTTCTGAGGGCAGCGCTCCAGGTAC | |
| | TSESATPESGPGTSTE | | TTCTGAAAGCGCTACCCCGGAGTCCG | |
| | PSEGSAPGSEPATSG | | GTCCAGGTACTTCTACTGAACCGTCCG | |
| | SETPGSPAGSPTSTEE | | AAGGTAGCGCACCAGGTACTTCTACC | |
| | GSSTPSGATGSPGTP | | GAACCGTCCGAGGGTAGCGCACCAGG | |
| | GSGTASSSPGSSTPS | | TAGCCCAGCAGGTTCTCCTACCTCCAC | |
| | GATGSPGTSTEPSEG | | CGAGGAAGGTACTTCTACCGAACCGT | |
| | SAPGTSTEPSEGSAP | | CCGAGGGTAGCGCACCAGGTACTTCT | |
| | GSEPATSGSETPGSP | | ACCGAACCTTCCGAGGGCAGCGCACC | |
| | AGSPTSTEEGSPAGS | | AGGTACTTCTGAAAGCGCTACCCCTG | |
| | PTSTEEGTSTEPSEGS | | AGTCCGGCCCAGGTACTTCTGAAAGC | |
| | APGASASGAPSTGGT | | GCTACTCCTGAATCCGGTCCAGGTAC | |
| | SESATPESGPGSPAG | | CTCTACTGAACCTTCCGAAGGCAGCG | |
| | SPTSTEEGSPAGSPTS | | CTCCAGGTACCTCTACCGAACCGTCC | |
| | TEEGSTSSTAESPGP | | GAGGGCAGCGCACCAGGTACTTCTGA | |
| | GSTSESPSGTAPGTSP | | AAGCGCAACCCCTGAATCCGGTCCAG | |
| | SGESSTAPGTPGSGT | | GTACTTCTACTGAACCTTCCGAAGGTA | |
| | ASSSPGSSTPSGATG | | GCGCTCCAGGTAGCGAACCTGCTACT | |
| | SPGSSPSASTGTGPG | | TCTGGTTCTGAAACCCCAGGTAGCCC | |
| | SEPATSGSETPGTSES | | GGCTGGCTCTCCGACCTCCACCGAGG | |
| | ATPESGPGSEPATSG | | AAGGTAGCTCTACCCCGTCTGGTGCT | |
| | SETPGSTSSTAESPGP | | ACTGGTTCTCCAGGTACTCCGGGCAG | |
| | GSTSSTAESPGPGTSP | | CGGTACTGCTTCTTCCTCTCCAGGTAG | |
| | SGESSTAPGSEPATS | | CTCTACCCCTTCTGGTGCTACTGGCTC | |
| | GSETPGSEPATSGSE | | TCCAGGTACCTCTACCGAACCGTCCG | |
| | TPGTSTEPSEGSAPG | | AGGGTAGCGCACCAGGTACCTCTACT | |
| | STSSTAESPGPGTSTP | | GAACCGTCTGAGGGTAGCGCTCCAGG | |
| | ESGSASPGSTSESPSG | | TAGCGAACCGGCAACCTCCGGTTCTG | |
| | TAPGTSTEPSEGSAP | | AAACTCCAGGTAGCCCTGCTGGCTCT | |
| | GTSTEPSEGSAPGTS | | CCGACTTCTACTGAGGAAGGTAGCCC | |
| | TEPSEGSAPGSSTPSG | | GGCTGGTTCTCCGACTTCTACTGAGGA | |
| | ATGSPGSSPSASTGT | | AGGTACTTCTACCGAACCTTCCGAAG | |
| | GPGASPGTSSTGSPG | | GTAGCGCTCCAGGTGCAAGCGCAAGC | |
| | SEPATSGSETPGTSES | | GGCGCGCCAAGCACGGGAGGTACTTC | |
| | ATPESGPGSPAGSPT | | TGAAAGCGCTACTCCTGAGTCCGGCC | |
| | STEEGSSTPSGATGS | | CAGGTAGCCCGGCTGGCTCTCCGACT | |
| | PGSSPSASTGTGPGA | | TCCACCGAGGAAGGTAGCCCGGCTGG | |
| | SPGTSSTGSPGTSESA | | CTCTCCAACTTCTACTGAAGAAGGTTC | |
| | TPESGPGTSTEPSEGS | | TACCAGCTCTACCGCTGAATCTCCTGG | |
| | APGTSTEPSEGSAPG | | CCCAGGTTCTACTAGCGAATCTCCGTC | |
| | FPTIPLSRLFDNAML | | TGGCACCGCACCAGGTACTTCCCCTA | |
| | RAHRLHQLAFDTYQ | | GCGGTGAATCTTCTACTGCACCAGGT | |
| | EFEEAYIPKEQKYSF | | ACCCCTGGCAGCGGTACCGCTTCTTCC | |
| | LQNPQTSLCFSESIPT | | TCTCCAGGTAGCTCTACCCCGTCTGGT | |
| | PSNREETQQKSNLEL | | GCTACTGGCTCTCCAGGTTCTAGCCCG | |
| | LRISLLLIQSWLEPVQ | | TCTGCATCTACCGGTACCGGCCCAGG | |
| | FLRSVFANSLVYGAS | | TAGCGAACCGGCAACCTCCGGCTCTG | |
| | DSNVYDLLKDLEEGI | | AAACTCCAGGTACTTCTGAAAGCGCT | |
| | QTLMGRLEDGSPRT | | ACTCCGGAATCCGGCCCAGGTAGCGA | |
| | GQIFKQTYSKFDTNS | | ACCGGCTACTTCCGGCTCTGAAACCC | |
| | HNDDALLKNYGLLY | | CAGGTTCCACCAGCTCTACTGCAGAA | |
| | CFRKDMDKVETFLRI | | TCTCCGGGCCCAGGTTCTACTAGCTCT | |
| | VQCRSVEGSCGFGG | | ACTGCAGAATCTCCGGGTCCAGGTAC | |
| | SEPATSGSETPGTSES | | TTCTCCTAGCGGCGAATCTTCTACCGC | |
| | ATPESGPGSEPATSG | | TCCAGGTAGCGAACCGGCAACCTCTG | |
| | SETPGSPAGSPTSTEE | | GCTCTGAAACTCCAGGTAGCGAACCT | |
| | GTSTEPSEGSAPGSE | | GCAACCTCCGGCTCTGAAACCCCAGG | |
| | PATSGSETPGSEPAT | | TACTTCTACTGAACCTTCTGAGGGCAG | |
| | SGSETPGSEPATSGS | | CGCACCAGGTTCTACCAGCTCTACCG | |
| | ETPGTSTEPSEGSAP | | CAGAATCTCCTGGTCCAGGTACCTCTA | |
| | GTSESATPESGPGSE | | CTCCGGAAAGCGGCTCTGCATCTCCA | |
| | PATSGSETPGTSTEPS | | GGTTCTACTAGCGAATCTCCTTCTGGC | |
| | EGSAP | | ACTGCACCAGGTACTTCTACCGAACC | |
| | | | GTCCGAAGGCAGCGCTCCAGGTACCT | |
| | | | CTACTGAACCTTCCGAGGGCAGCGCT | |
| | | | CCAGGTACCTCTACCGAACCTTCTGA | |
| | | | AGGTAGCGCACCAGGTAGCTCTACTC | |
| | | | CGTCTGGTGCAACCGGCTCCCCAGGT | |
| | | | TCTAGCCCGTCTGCTTCCACTGGTACT | |
| | | | GGCCCAGGTGCTTCCCCGGGCACCAG | |
| | | | CTCTACTGGTTCTCCAGGTAGCGAACC | |
| | | | TGCTACCTCCGGTTCTGAAACCCCAG | |
| | | | GTACCTCTGAAAGCGCAACTCCGGAG | |
| | | | TCTGGTCCAGGTAGCCCTGCAGGTTCT | |
| | | | CCTACCTCCACTGAGGAAGGTAGCTC | |
| | | | TACTCCGTCTGGTGCAACCGGCTCCCC | |
| | | | AGGTTCTAGCCCGTCTGCTTCCACTGG | |
| | | | TACTGGCCCAGGTGCTTCCCCGGGCA | |
| | | | CCAGCTCTACTGGTTCTCCAGGTACCT | |
| | | | CTGAAAGCGCTACTCCGGAGTCTGGC | |
| | | | CCAGGTACCTCTACTGAACCGTCTGA | |
| | | | GGGTAGCGCTCCAGGTACTTCTACTG | |
| | | | AACCGTCCGAAGGTAGCGCACCAGGT | |
| | | | TTTCCGACTATTCCGCTGTCTCGTCTG | |
| | | | TTTGATAATGCTATGCTGCGTGCGCAC | |
| | | | CGTCTGCACCAGCTGGCCTTTGATACT | |
| | | | TACCAGGAATTTGAAGAAGCcTACATT | |
| | | | CCTAAAGAGCAGAAGTACTCTTTCCT | |
| | | | GCAAAACCCACAGACTTCTCTCTGCTT | |
| | | | CAGCGAATCTATTCCGACGCCTTCCA | |
| | | | ATCGCGAGGAAACTCAGCAAAAGTCC | |
| | | | AATCTGGAACTACTCCGCATTTCTCTG | |
| | | | CTTCTGATTCAGAGCTGGCTAGAACC | |
| | | | AGTGCAATTTCTGCGTTCCGTCTTCGC | |
| | | | CAATAGCCTAGTTTATGGCGCATCCG | |
| | | | ACAGCAACGTATACGATCTCCTGAAA | |
| | | | GATCTCGAGGAAGGCATTCAGACCCT | |
| | | | GATGGGTCGTCTCGAGGATGGCTCTC | |
| | | | CGCGTACTGGTCAGATCTTCAAGCAG | |
| | | | ACTTACTCTAAATTTGATACTAACAGC | |
| | | | CACAATGACGATGCGCTTCTAAAAAA | |
| | | | CTATGGTCTGCTGTATTGTTTTCGTAA | |
| | | | AGATATGGACAAAGTTGAAACCTTCC | |
| | | | TGCGTATTGTTCAGTGTCGTTCCGTTG | |
| | | | AGGGCAGCTGTGGTTTCTAAGGTGGT | |
| | | | AGCGAACCGGCAACTTCCGGCTCTGA | |
| | | | AACCCCAGGTACTTCTGAAAGCGCTA | |
| | | | CTCCTGAGTCTGGCCCAGGTAGCGAA | |
| | | | CCTGCTACCTCTGGCTCTGAAACCCCA | |
| | | | GGTAGCCCGGCAGGCTCTCCGACTTC | |
| | | | CACCGAGGAAGGTACCTCTACTGAAC | |
| | | | CTTCTGAGGGTAGCGCTCCAGGTAGC | |
| | | | GAACCGGCAACCTCTGGCTCTGAAAC | |
| | | | CCCAGGTAGCGAACCTGCTACCTCCG | |
| | | | GCTCTGAAACTCCAGGTAGCGAACCG | |
| | | | GCTACTTCCGGTTCTGAAACTCCAGGT | |
| | | | ACCTCTACCGAACCTTCCGAAGGCAG | |
| | | | CGCACCAGGTACTTCTGAAAGCGCAA | |
| | | | CCCCTGAATCCGGTCCAGGTAGCGAA | |
| | | | CCGGCTACTTCTGGCTCTGAGACTCCA | |
| | | | GGTACTTCTACCGAACCGTCCGAAGG | |
| | | | TAGCGCACCA | |
| AE912- | MAEPAGSPTSTEEGT | 757 | ATGGCTGAACCTGCTGGCTCTCCAAC | 758 |
| hGH- | PGSGTASSSPGSSTPS | | CTCCACTGAGGAAGGTACCCCGGGTA | |
| AE144 | GATGSPGASPGTSST | | GCGGTACTGCTTCTTCCTCTCCAGGTA | |
| | GSPGSPAGSPTSTEE | | GCTCTACCCCTTCTGGTGCAACCGGCT | |
| | GTSESATPESGPGTS | | CTCCAGGTGCTTCTCCGGGCACCAGCT | |
| | TEPSEGSAPGSPAGS | | CTACCGGTTCTCCAGGTAGCCCGGCT | |
| | PTSTEEGTSTEPSEGS | | GGCTCTCCTACCTCTACTGAGGAAGG | |
| | APGTSTEPSEGSAPG | | TACTTCTGAAAGCGCTACTCCTGAGTC | |
| | TSESATPESGPGSEP | | TGGTCCAGGTACCTCTACTGAACCGTC | |
| | ATSGSETPGSEPATS | | CGAAGGTAGCGCTCCAGGTAGCCCAG | |
| | GSETPGSPAGSPTST | | CAGGCTCTCCGACTTCCACTGAGGAA | |
| | EEGTSESATPESGPG | | GGTACTTCTACTGAACCTTCCGAAGG | |
| | TSTEPSEGSAPGTSTE | | CAGCGCACCAGGTACCTCTACTGAAC | |
| | PSEGSAPGSPAGSPT | | CTTCTGAGGGCAGCGCTCCAGGTACT | |
| | STEEGTSTEPSEGSAP | | TCTGAAAGCGCTACCCCGGAATCTGG | |
| | GTSTEPSEGSAPGTS | | CCCAGGTAGCGAACCGGCTACTTCTG | |
| | ESATPESGPGTSTEPS | | GTTCTGAAACCCCAGGTAGCGAACCG | |
| | EGSAPGTSESATPES | | GCTACCTCCGGTTCTGAAACTCCAGGT | |
| | GPGSEPATSGSETPG | | AGCCCGGCAGGCTCTCCGACCTCTAC | |
| | TSTEPSEGSAPGTSTE | | TGAGGAAGGTACTTCTGAAAGCGCAA | |
| | PSEGSAPGTSESATP | | CCCCGGAGTCCGGCCCAGGTACCTCT | |
| | ESGPGTSESATPESG | | ACCGAACCGTCTGAGGGCAGCGCACC | |
| | PGSPAGSPTSTEEGT | | AGGTACTTCTACCGAACCGTCCGAGG | |
| | SESATPESGPGSEPA | | GTAGCGCACCAGGTAGCCCAGCAGGT | |
| | TSGSETPGTSESATPE | | TCTCCTACCTCCACCGAGGAAGGTAC | |
| | SGPGTSTEPSEGSAP | | TTCTACCGAACCGTCCGAGGGTAGCG | |
| | GTSTEPSEGSAPGTS | | CACCAGGTACCTCTACTGAACCTTCTG | |
| | TEPSEGSAPGTSTEPS | | AGGGCAGCGCTCCAGGTACTTCTGAA | |
| | EGSAPGTSTEPSEGS | | AGCGCTACCCCGGAGTCCGGTCCAGG | |
| | APGTSTEPSEGSAPG | | TACTTCTACTGAACCGTCCGAAGGTA | |
| | SPAGSPTSTEEGTSTE | | GCGCACCAGGTACTTCTGAAAGCGCA | |
| | PSEGSAPGTSESATP | | ACCCCTGAATCCGGTCCAGGTAGCGA | |
| | ESGPGSEPATSGSET | | ACCGGCTACTTCTGGCTCTGAGACTCC | |
| | PGTSESATPESGPGS | | AGGTACTTCTACCGAACCGTCCGAAG | |
| | EPATSGSETPGTSES | | GTAGCGCACCAGGTACTTCTACTGAA | |
| | ATPESGPGTSTEPSE | | CCGTCTGAAGGTAGCGCACCAGGTAC | |
| | GSAPGTSESATPESG | | TTCTGAAAGCGCAACCCCGGAATCCG | |
| | PGSPAGSPTSTEEGSP | | GCCCAGGTACCTCTGAAAGCGCAACC | |
| | AGSPTSTEEGSPAGS | | CCGGAGTCCGGCCCAGGTAGCCCTGC | |
| | PTSTEEGTSESATPES | | TGGCTCTCCAACCTCCACCGAAGAAG | |
| | GPGTSTEPSEGSAPG | | GTACCTCTGAAAGCGCAACCCCTGAA | |
| | TSESATPESGPGSEP | | TCCGGCCCAGGTAGCGAACCGGCAAC | |
| | ATSGSETPGTSESAT | | CTCCGGTTCTGAAACCCCAGGTACCTC | |
| | PESGPGSEPATSGSE | | TGAAAGCGCTACTCCGGAGTCTGGCC | |
| | TPGTSESATPESGPG | | CAGGTACCTCTACTGAACCGTCTGAG | |
| | TSTEPSEGSAPGSPA | | GGTAGCGCTCCAGGTACTTCTACTGA | |
| | GSPTSTEEGTSESATP | | ACCGTCCGAAGGTAGCGCACCAGGTA | |
| | ESGPGSEPATSGSET | | CTTCTACCGAACCGTCCGAAGGCAGC | |
| | PGTSESATPESGPGSP | | GCTCCAGGTACCTCTACTGAACCTTCC | |
| | AGSPTSTEEGSPAGS | | GAGGGCAGCGCTCCAGGTACCTCTAC | |
| | PTSTEEGTSTEPSEGS | | CGAACCTTCTGAAGGTAGCGCACCAG | |
| | APGTSESATPESGPG | | GTACTTCTACCGAACCGTCCGAGGGT | |
| | TSESATPESGPGTSES | | AGCGCACCAGGTAGCCCAGCAGGTTC | |
| | ATPESGPGSEPATSG | | TCCTACCTCCACCGAGGAAGGTACTT | |
| | SETPGSEPATSGSETP | | CTACCGAACCGTCCGAGGGTAGCGCA | |
| | GSPAGSPTSTEEGTS | | CCAGGTACCTCTGAAAGCGCAACTCC | |
| | TEPSEGSAPGTSTEPS | | TGAGTCTGGCCCAGGTAGCGAACCTG | |
| | EGSAPGSEPATSGSE | | CTACCTCCGGCTCTGAGACTCCAGGT | |
| | TPGTSESATPESGPG | | ACCTCTGAAAGCGCAACCCCGGAATC | |
| | TSTEPSEGSAPGFPTI | | TGGTCCAGGTAGCGAACCTGCAACCT | |
| | PLSRLFDNAMLRAH | | CTGGCTCTGAAACCCCAGGTACCTCT | |
| | RLHQLAFDTYQEFEE | | GAAAGCGCTACTCCTGAATCTGGCCC | |
| | AYIPKEQKYSFLQNP | | AGGTACTTCTACTGAACCGTCCGAGG | |
| | QTSLCFSESIPTPSNR | | GCAGCGCACCAGGTACTTCTGAAAGC | |
| | EETQQKSNLELLRIS | | GCTACTCCTGAGTCCGGCCCAGGTAG | |
| | LLLIQSWLEPVQFLR | | CCCGGCTGGCTCTCCGACTTCCACCGA | |
| | SVFANSLVYGASDS | | GGAAGGTAGCCCGGCTGGCTCTCCAA | |
| | NVYDLLKDLEEGIQT | | CTTCTACTGAAGAAGGTAGCCCGGCA | |
| | LMGRLEDGSPRTGQI | | GGCTCTCCGACCTCTACTGAGGAAGG | |
| | FKQTYSKFDTNSHN | | TACTTCTGAAAGCGCAACCCCGGAGT | |
| | DDALLKNYGLLYCF | | CCGGCCCAGGTACCTCTACCGAACCG | |
| | RKDMDKVETFLRIV | | TCTGAGGGCAGCGCACCAGGTACCTC | |
| | QCRSVEGSCGFGGTS | | TGAAAGCGCAACTCCTGAGTCTGGCC | |
| | ESATPESGPGTSTEPS | | CAGGTAGCGAACCTGCTACCTCCGGC | |
| | EGSAPGTSTEPSEGS | | TCTGAGACTCCAGGTACCTCTGAAAG | |
| | APGTSESATPESGPG | | CGCAACCCCGGAATCTGGTCCAGGTA | |
| | TSTEPSEGSAPGTSTE | | GCGAACCTGCAACCTCTGGCTCTGAA | |
| | PSEGSAPGTSESATP | | ACCCCAGGTACCTCTGAAAGCGCTAC | |
| | ESGPGTSTEPSEGSA | | TCCTGAATCTGGCCCAGGTACTTCTAC | |
| | PGTSTEPSEGSAPGT | | TGAACCGTCCGAGGGCAGCGCACCAG | |
| | STEPSEGSAPGSPAG | | GTAGCCCTGCTGGCTCTCCAACCTCCA | |
| | SPTSTEEGTSTEPSEG | | CCGAAGAAGGTACCTCTGAAAGCGCA | |
| | SAPG | | ACCCCTGAATCCGGCCCAGGTAGCGA | |
| | | | ACCGGCAACCTCCGGTTCTGAAACCC | |
| | | | CAGGTACTTCTGAAAGCGCTACTCCT | |
| | | | GAGTCCGGCCCAGGTAGCCCGGCTGG | |
| | | | CTCTCCGACTTCCACCGAGGAAGGTA | |
| | | | GCCCGGCTGGCTCTCCAACTTCTACTG | |
| | | | AAGAAGGTACTTCTACCGAACCTTCC | |
| | | | GAGGGCAGCGCACCAGGTACTTCTGA | |
| | | | AAGCGCTACCCCTGAGTCCGGCCCAG | |
| | | | GTACTTCTGAAAGCGCTACTCCTGAAT | |
| | | | CCGGTCCAGGTACTTCTGAAAGCGCT | |
| | | | ACCCCGGAATCTGGCCCAGGTAGCGA | |
| | | | ACCGGCTACTTCTGGTTCTGAAACCCC | |
| | | | AGGTAGCGAACCGGCTACCTCCGGTT | |
| | | | CTGAAACTCCAGGTAGCCCAGCAGGC | |
| | | | TCTCCGACTTCCACTGAGGAAGGTAC | |
| | | | TTCTACTGAACCTTCCGAAGGCAGCG | |
| | | | CACCAGGTACCTCTACTGAACCTTCTG | |
| | | | AGGGCAGCGCTCCAGGTAGCGAACCT | |
| | | | GCAACCTCTGGCTCTGAAACCCCAGG | |
| | | | TACCTCTGAAAGCGCTACTCCTGAATC | |
| | | | TGGCCCAGGTACTTCTACTGAACCGTC | |
| | | | CGAGGGCAGCGCACCAGGTTTTCCGA | |
| | | | CTATTCCGCTGTCTCGTCTGTTTGATA | |
| | | | ATGCTATGCTGCGTGCGCACCGTCTGC | |
| | | | ACCAGCTGGCCTTTGATACTTACCAG | |
| | | | GAATTTGAAGAAGCcTACATTCCTAAA | |
| | | | GAGCAGAAGTACTCTTTCCTGCAAAA | |
| | | | CCCACAGACTTCTCTCTGCTTCAGCGA | |
| | | | ATCTATTCCGACGCCTTCCAATCGCGA | |
| | | | GGAAACTCAGCAAAAGTCCAATCTGG | |
| | | | AACTACTCCGCATTTCTCTGCTTCTGA | |
| | | | TTCAGAGCTGGCTAGAACCAGTGCAA | |
| | | | TTTCTGCGTTCCGTCTTCGCCAATAGC | |
| | | | CTAGTTTATGGCGCATCCGACAGCAA | |
| | | | CGTATACGATCTCCTGAAAGATCTCG | |
| | | | AGGAAGGCATTCAGACCCTGATGGGT | |
| | | | CGTCTCGAGGATGGCTCTCCGCGTACT | |
| | | | GGTCAGATCTTCAAGCAGACTTACTCT | |
| | | | AAATTTGATACTAACAGCCACAATGA | |
| | | | CGATGCGCTTCTAAAAAACTATGGTC | |
| | | | TGCTGTATTGTTTTCGTAAAGATATGG | |
| | | | ACAAAGTTGAAACCTTCCTGCGTATT | |
| | | | GTTCAGTGTCGTTCCGTTGAGGGCAG | |
| | | | CTGTGGTTTCTAAGGTGGTAGCGAAC | |
| | | | CGGCAACTTCCGGCTCTGAAACCCCA | |
| | | | GGTACTTCTGAAAGCGCTACTCCTGA | |
| | | | GTCTGGCCCAGGTAGCGAACCTGCTA | |
| | | | CCTCTGGCTCTGAAACCCCAGGTAGC | |
| | | | CCGGCAGGCTCTCCGACTTCCACCGA | |
| | | | GGAAGGTACCTCTACTGAACCTTCTG | |
| | | | AGGGTAGCGCTCCAGGTAGCGAACCG | |
| | | | GCAACCTCTGGCTCTGAAACCCCAGG | |
| | | | TAGCGAACCTGCTACCTCCGGCTCTG | |
| | | | AAACTCCAGGTAGCGAACCGGCTACT | |
| | | | TCCGGTTCTGAAACTCCAGGTACCTCT | |
| | | | ACCGAACCTTCCGAAGGCAGCGCACC | |
| | | | AGGTACTTCTGAAAGCGCAACCCCTG | |
| | | | AATCCGGTCCAGGTAGCGAACCGGCT | |
| | | | ACTTCTGGCTCTGAGACTCCAGGTACT | |
| | | | TCTACCGAACCGTCCGAAGGTAGCGC | |
| | | | ACCA | |
| AM923- | MAEPAGSPTSTEEGA | 759 | ATGGCTGAACCTGCTGGCTCTCCAAC | 760 |
| hGH- | SPGTSSTGSPGSSTPS | | CTCCACTGAGGAAGGTACCCCGGGTA | |
| AE144 | GATGSPGSSTPSGAT | | GCGGTACTGCTTCTTCCTCTCCAGGTA | |
| | GSPGTSTEPSEGSAP | | GCTCTACCCCTTCTGGTGCAACCGGCT | |
| | GSEPATSGSETPGSP | | CTCCAGGTGCTTCTCCGGGCACCAGCT | |
| | AGSPTSTEEGSTSST | | CTACCGGTTCTCCAGGTAGCCCGGCT | |
| | AESPGPGTSTPESGS | | GGCTCTCCTACCTCTACTGAGGAAGG | |
| | ASPGSTSESPSGTAP | | TACTTCTGAAAGCGCTACTCCTGAGTC | |
| | GSTSESPSGTAPGTS | | TGGTCCAGGTACCTCTACTGAACCGTC | |
| | TPESGSASPGTSTPES | | CGAAGGTAGCGCTCCAGGTAGCCCAG | |
| | GSASPGSEPATSGSE | | CAGGCTCTCCGACTTCCACTGAGGAA | |
| | TPGTSESATPESGPG | | GGTACTTCTACTGAACCTTCCGAAGG | |
| | SPAGSPTSTEEGTSTE | | CAGCGCACCAGGTACCTCTACTGAAC | |
| | PSEGSAPGTSESATP | | CTTCTGAGGGCAGCGCTCCAGGTACT | |
| | ESGPGTSTEPSEGSA | | TCTGAAAGCGCTACCCCGGAATCTGG | |
| | PGTSTEPSEGSAPGSP | | CCCAGGTAGCGAACCGGCTACTTCTG | |
| | AGSPTSTEEGTSTEPS | | GTTCTGAAACCCCAGGTAGCGAACCG | |
| | EGSAPGTSTEPSEGS | | GCTACCTCCGGTTCTGAAACTCCAGGT | |
| | APGTSESATPESGPG | | AGCCCGGCAGGCTCTCCGACCTCTAC | |
| | TSESATPESGPGTSTE | | TGAGGAAGGTACTTCTGAAAGCGCAA | |
| | PSEGSAPGTSTEPSE | | CCCCGGAGTCCGGCCCAGGTACCTCT | |
| | GSAPGTSESATPESG | | ACCGAACCGTCTGAGGGCAGCGCACC | |
| | PGTSTEPSEGSAPGS | | AGGTACTTCTACCGAACCGTCCGAGG | |
| | EPATSGSETPGSPAG | | GTAGCGCACCAGGTAGCCCAGCAGGT | |
| | SPTSTEEGSSTPSGAT | | TCTCCTACCTCCACCGAGGAAGGTAC | |
| | GSPGTPGSGTASSSP | | TTCTACCGAACCGTCCGAGGGTAGCG | |
| | GSSTPSGATGSPGTS | | CACCAGGTACCTCTACTGAACCTTCTG | |
| | TEPSEGSAPGTSTEPS | | AGGGCAGCGCTCCAGGTACTTCTGAA | |
| | EGSAPGSEPATSGSE | | AGCGCTACCCCGGAGTCCGGTCCAGG | |
| | TPGSPAGSPTSTEEG | | TACTTCTACTGAACCGTCCGAAGGTA | |
| | SPAGSPTSTEEGTSTE | | GCGCACCAGGTACTTCTGAAAGCGCA | |
| | PSEGSAPGASASGAP | | ACCCCTGAATCCGGTCCAGGTAGCGA | |
| | STGGTSESATPESGP | | ACCGGCTACTTCTGGCTCTGAGACTCC | |
| | GSPAGSPTSTEEGSP | | AGGTACTTCTACCGAACCGTCCGAAG | |
| | AGSPTSTEEGSTSST | | GTAGCGCACCAGGTACTTCTACTGAA | |
| | AESPGPGSTSESPSGT | | CCGTCTGAAGGTAGCGCACCAGGTAC | |
| | APGTSPSGESSTAPG | | TTCTGAAAGCGCAACCCCGGAATCCG | |
| | TPGSGTASSSPGSSTP | | GCCCAGGTACCTCTGAAAGCGCAACC | |
| | SGATGSPGSSPSAST | | CCGGAGTCCGGCCCAGGTAGCCCTGC | |
| | GTGPGSEPATSGSET | | TGGCTCTCCAACCTCCACCGAAGAAG | |
| | PGTSESATPESGPGS | | GTACCTCTGAAAGCGCAACCCCTGAA | |
| | EPATSGSETPGSTSST | | TCCGGCCCAGGTAGCGAACCGGCAAC | |
| | AESPGPGSTSSTAESP | | CTCCGGTTCTGAAACCCCAGGTACCTC | |
| | GPGTSPSGESSTAPG | | TGAAAGCGCTACTCCGGAGTCTGGCC | |
| | SEPATSGSETPGSEP | | CAGGTACCTCTACTGAACCGTCTGAG | |
| | ATSGSETPGTSTEPSE | | GGTAGCGCTCCAGGTACTTCTACTGA | |
| | GSAPGSTSSTAESPG | | ACCGTCCGAAGGTAGCGCACCAGGTA | |
| | PGTSTPESGSASPGST | | CTTCTACCGAACCGTCCGAAGGCAGC | |
| | SESPSGTAPGTSTEPS | | GCTCCAGGTACCTCTACTGAACCTTCC | |
| | EGSAPGTSTEPSEGS | | GAGGGCAGCGCTCCAGGTACCTCTAC | |
| | APGTSTEPSEGSAPG | | CGAACCTTCTGAAGGTAGCGCACCAG | |
| | SSTPSGATGSPGSSPS | | GTACTTCTACCGAACCGTCCGAGGGT | |
| | ASTGTGPGASPGTSS | | AGCGCACCAGGTAGCCCAGCAGGTTC | |
| | TGSPGSEPATSGSET | | TCCTACCTCCACCGAGGAAGGTACTT | |
| | PGTSESATPESGPGSP | | CTACCGAACCGTCCGAGGGTAGCGCA | |
| | AGSPTSTEEGSSTPS | | CCAGGTACCTCTGAAAGCGCAACTCC | |
| | GATGSPGSSPSASTG | | TGAGTCTGGCCCAGGTAGCGAACCTG | |
| | TGPGASPGTSSTGSP | | CTACCTCCGGCTCTGAGACTCCAGGT | |
| | GTSESATPESGPGTS | | ACCTCTGAAAGCGCAACCCCGGAATC | |
| | TEPSEGSAPGTSTEPS | | TGGTCCAGGTAGCGAACCTGCAACCT | |
| | EGSAPGFPTIPLSRLF | | CTGGCTCTGAAACCCCAGGTACCTCT | |
| | DNAMLRAHRLHQL | | GAAAGCGCTACTCCTGAATCTGGCCC | |
| | AFDTYQEFEEAYIPK | | AGGTACTTCTACTGAACCGTCCGAGG | |
| | EQKYSFLQNPQTSLC | | GCAGCGCACCAGGTACTTCTGAAAGC | |
| | FSESIPTPSNREETQQ | | GCTACTCCTGAGTCCGGCCCAGGTAG | |
| | KSNLELLRISLLLIQS | | CCCGGCTGGCTCTCCGACTTCCACCGA | |
| | WLEPVQFLRSVFAN | | GGAAGGTAGCCCGGCTGGCTCTCCAA | |
| | SLVYGASDSNVYDL | | CTTCTACTGAAGAAGGTAGCCCGGCA | |
| | LKDLEEGIQTLMGRL | | GGCTCTCCGACCTCTACTGAGGAAGG | |
| | EDGSPRTGQIFKQTY | | TACTTCTGAAAGCGCAACCCCGGAGT | |
| | SKFDTNSHNDDALL | | CCGGCCCAGGTACCTCTACCGAACCG | |
| | KNYGLLYCFRKDMD | | TCTGAGGGCAGCGCACCAGGTACCTC | |
| | KVETFLRIVQCRSVE | | TGAAAGCGCAACTCCTGAGTCTGGCC | |
| | GSCGFGGSEPATSGS | | CAGGTAGCGAACCTGCTACCTCCGGC | |
| | ETPGTSESATPESGP | | TCTGAGACTCCAGGTACCTCTGAAAG | |
| | GSEPATSGSETPGSP | | CGCAACCCCGGAATCTGGTCCAGGTA | |
| | AGSPTSTEEGTSTEPS | | GCGAACCTGCAACCTCTGGCTCTGAA | |
| | EGSAPGSEPATSGSE | | ACCCCAGGTACCTCTGAAAGCGCTAC | |
| | TPGSEPATSGSETPG | | TCCTGAATCTGGCCCAGGTACTTCTAC | |
| | SEPATSGSETPGTSTE | | TGAACCGTCCGAGGGCAGCGCACCAG | |
| | PSEGSAPGTSESATP | | GTAGCCCTGCTGGCTCTCCAACCTCCA | |
| | ESGPGSEPATSGSET | | CCGAAGAAGGTACCTCTGAAAGCGCA | |
| | PGTSTEPSEGSAP | | ACCCCTGAATCCGGCCCAGGTAGCGA | |
| | | | ACCGGCAACCTCCGGTTCTGAAACCC | |
| | | | CAGGTACTTCTGAAAGCGCTACTCCT | |
| | | | GAGTCCGGCCCAGGTAGCCCGGCTGG | |
| | | | CTCTCCGACTTCCACCGAGGAAGGTA | |
| | | | GCCCGGCTGGCTCTCCAACTTCTACTG | |
| | | | AAGAAGGTACTTCTACCGAACCTTCC | |
| | | | GAGGGCAGCGCACCAGGTACTTCTGA | |
| | | | AAGCGCTACCCCTGAGTCCGGCCCAG | |
| | | | GTACTTCTGAAAGCGCTACTCCTGAAT | |
| | | | CCGGTCCAGGTACTTCTGAAAGCGCT | |
| | | | ACCCCGGAATCTGGCCCAGGTAGCGA | |
| | | | ACCGGCTACTTCTGGTTCTGAAACCCC | |
| | | | AGGTAGCGAACCGGCTACCTCCGGTT | |
| | | | CTGAAACTCCAGGTAGCCCAGCAGGC | |
| | | | TCTCCGACTTCCACTGAGGAAGGTAC | |
| | | | TTCTACTGAACCTTCCGAAGGCAGCG | |
| | | | CACCAGGTACCTCTACTGAACCTTCTG | |
| | | | AGGGCAGCGCTCCAGGTAGCGAACCT | |
| | | | GCAACCTCTGGCTCTGAAACCCCAGG | |
| | | | TACCTCTGAAAGCGCTACTCCTGAATC | |
| | | | TGGCCCAGGTACTTCTACTGAACCGTC | |
| | | | CGAGGGCAGCGCACCAGGTTTTCCGA | |
| | | | CTATTCCGCTGTCTCGTCTGTTTGATA | |
| | | | ATGCTATGCTGCGTGCGCACCGTCTGC | |
| | | | ACCAGCTGGCCTTTGATACTTACCAG | |
| | | | GAATTTGAAGAAGCcTACATTCCTAAA | |
| | | | GAGCAGAAGTACTCTTTCCTGCAAAA | |
| | | | CCCACAGACTTCTCTCTGCTTCAGCGA | |
| | | | ATCTATTCCGACGCCTTCCAATCGCGA | |
| | | | GGAAACTCAGCAAAAGTCCAATCTGG | |
| | | | AACTACTCCGCATTTCTCTGCTTCTGA | |
| | | | TTCAGAGCTGGCTAGAACCAGTGCAA | |
| | | | TTTCTGCGTTCCGTgTTCGCCAATAGC | |
| | | | CTAGTTTATGGCGCATCCGACAGCAA | |
| | | | CGTATACGATCTCCTGAAAGATCTCG | |
| | | | AGGAAGGCATTCAGACCCTGATGGGT | |
| | | | CGTCTCGAGGATGGCTCTCCGCGTACT | |
| | | | GGTCAGATCTTCAAGCAGACTTACTCT | |
| | | | AAATTTGATACTAACAGCCACAATGA | |
| | | | CGATGCGCTTCTAAAAAACTATGGTC | |
| | | | TGCTGTATTGTTTTCGTAAAGATATGG | |
| | | | ACAAAGTTGAAACCTTCCTGCGTATT | |
| | | | GTTCAGTGTCGTTCCGTTGAGGGCAG | |
| | | | CTGTGGTTTCGGAGGTACTTCTGAAA | |
| | | | GCGCTACTCCGGAGTCCGGTCCAGGT | |
| | | | ACCTCTACCGAACCGTCCGAAGGCAG | |
| | | | CGCTCCAGGTACTTCTACTGAACCTTC | |
| | | | TGAGGGTAGCGCTCCAGGTACTTCTG | |
| | | | AAAGCGCTACTCCGGAGTCCGGTCCA | |
| | | | GGTACCTCTACCGAACCGTCCGAAGG | |
| | | | CAGCGCTCCAGGTACTTCTACTGAAC | |
| | | | CTTCTGAGGGTAGCGCTCCAGGTACC | |
| | | | TCTGAAAGCGCTACTCCGGAGTCTGG | |
| | | | CCCAGGTACCTCTACTGAACCGTCTG | |
| | | | AGGGTAGCGCTCCAGGTACTTCTACT | |
| | | | GAACCGTCCGAAGGTAGCGCACCAGG | |
| | | | TACTTCTACCGAACCGTCCGAGGGTA | |
| | | | GCGCACCAGGTAGCCCAGCAGGTTCT | |
| | | | CCTACCTCCACCGAGGAAGGTACTTC | |
| | | | TACCGAACCGTCCGAGGGTAGCGCAC | |
| | | | CAGGTTAA | |
| AM1318- | GTSTEPSEGSAPGSE | 761 | GGTACTTCTACTGAACCGTCTGAAGG | 762 |
| hGH- | PATSGSETPGSPAGS | | CAGCGCACCAGGTAGCGAACCGGCTA | |
| AE144 | PTSTEEGSTSSTAESP | | CTTCCGGTTCTGAAACCCCAGGTAGC | |
| | GPGTSTPESGSASPG | | CCAGCAGGTTCTCCAACTTCTACTGAA | |
| | STSESPSGTAPGSTSE | | GAAGGTTCTACCAGCTCTACCGCAGA | |
| | SPSGTAPGTSTPESGS | | ATCTCCTGGTCCAGGTACCTCTACTCC | |
| | ASPGTSTPESGSASP | | GGAAAGCGGCTCTGCATCTCCAGGTT | |
| | GSEPATSGSETPGTS | | CTACTAGCGAATCTCCTTCTGGCACTG | |
| | ESATPESGPGSPAGS | | CACCAGGTTCTACTAGCGAATCCCCG | |
| | PTSTEEGTSTEPSEGS | | TCTGGTACTGCTCCAGGTACTTCTACT | |
| | APGTSESATPESGPG | | CCTGAAAGCGGTTCCGCTTCTCCAGGT | |
| | TSTEPSEGSAPGTSTE | | ACCTCTACTCCGGAAAGCGGTTCTGC | |
| | PSEGSAPGSPAGSPT | | ATCTCCAGGTAGCGAACCGGCAACCT | |
| | STEEGTSTEPSEGSAP | | CCGGCTCTGAAACCCCAGGTACCTCT | |
| | GTSTEPSEGSAPGTS | | GAAAGCGCTACTCCTGAATCCGGCCC | |
| | ESATPESGPGTSESA | | AGGTAGCCCGGCAGGTTCTCCGACTT | |
| | TPESGPGTSTEPSEGS | | CCACTGAGGAAGGTACCTCTACTGAA | |
| | APGTSTEPSEGSAPG | | CCTTCTGAGGGCAGCGCTCCAGGTAC | |
| | TSESATPESGPGTSTE | | TTCTGAAAGCGCTACCCCGGAGTCCG | |
| | PSEGSAPGSEPATSG | | GTCCAGGTACTTCTACTGAACCGTCCG | |
| | SETPGSPAGSPTSTEE | | AAGGTAGCGCACCAGGTACTTCTACC | |
| | GSSTPSGATGSPGTP | | GAACCGTCCGAGGGTAGCGCACCAGG | |
| | GSGTASSSPGSSTPS | | TAGCCCAGCAGGTTCTCCTACCTCCAC | |
| | GATGSPGTSTEPSEG | | CGAGGAAGGTACTTCTACCGAACCGT | |
| | SAPGTSTEPSEGSAP | | CCGAGGGTAGCGCACCAGGTACTTCT | |
| | GSEPATSGSETPGSP | | ACCGAACCTTCCGAGGGCAGCGCACC | |
| | AGSPTSTEEGSPAGS | | AGGTACTTCTGAAAGCGCTACCCCTG | |
| | PTSTEEGTSTEPSEGS | | AGTCCGGCCCAGGTACTTCTGAAAGC | |
| | APGPEPTGPAPSGGS | | GCTACTCCTGAATCCGGTCCAGGTAC | |
| | EPATSGSETPGTSES | | CTCTACTGAACCTTCCGAAGGCAGCG | |
| | ATPESGPGSPAGSPT | | CTCCAGGTACCTCTACCGAACCGTCC | |
| | STEEGTSESATPESGP | | GAGGGCAGCGCACCAGGTACTTCTGA | |
| | GSPAGSPTSTEEGSP | | AAGCGCAACCCCTGAATCCGGTCCAG | |
| | AGSPTSTEEGTSESA | | GTACTTCTACTGAACCTTCCGAAGGTA | |
| | TPESGPGSPAGSPTST | | GCGCTCCAGGTAGCGAACCTGCTACT | |
| | EEGSPAGSPTSTEEG | | TCTGGTTCTGAAACCCCAGGTAGCCC | |
| | STSSTAESPGPGSTSE | | GGCTGGCTCTCCGACCTCCACCGAGG | |
| | SPSGTAPGTSPSGESS | | AAGGTAGCTCTACCCCGTCTGGTGCT | |
| | TAPGSTSESPSGTAP | | ACTGGTTCTCCAGGTACTCCGGGCAG | |
| | GSTSESPSGTAPGTSP | | CGGTACTGCTTCTTCCTCTCCAGGTAG | |
| | SGESSTAPGTSTEPSE | | CTCTACCCCTTCTGGTGCTACTGGCTC | |
| | GSAPGTSESATPESG | | TCCAGGTACCTCTACCGAACCGTCCG | |
| | PGTSESATPESGPGS | | AGGGTAGCGCACCAGGTACCTCTACT | |
| | EPATSGSETPGTSES | | GAACCGTCTGAGGGTAGCGCTCCAGG | |
| | ATPESGPGTSESATP | | TAGCGAACCGGCAACCTCCGGTTCTG | |
| | ESGPGTSTEPSEGSA | | AAACTCCAGGTAGCCCTGCTGGCTCT | |
| | PGTSESATPESGPGT | | CCGACTTCTACTGAGGAAGGTAGCCC | |
| | STEPSEGSAPGTSPSG | | GGCTGGTTCTCCGACTTCTACTGAGGA | |
| | ESSTAPGTSPSGESST | | AGGTACTTCTACCGAACCTTCCGAAG | |
| | APGTSPSGESSTAPG | | GTAGCGCTCCAGGTCCAGAACCAACG | |
| | TSTEPSEGSAPGSPA | | GGGCCGGCCCCAAGCGGAGGTAGCGA | |
| | GSPTSTEEGTSTEPSE | | ACCGGCAACCTCCGGCTCTGAAACCC | |
| | GSAPGSSPSASTGTG | | CAGGTACCTCTGAAAGCGCTACTCCT | |
| | PGSSTPSGATGSPGS | | GAATCCGGCCCAGGTAGCCCGGCAGG | |
| | STPSGATGSPGSSTPS | | TTCTCCGACTTCCACTGAGGAAGGTA | |
| | GATGSPGSSTPSGAT | | CTTCTGAAAGCGCTACTCCTGAGTCCG | |
| | GSPGASPGTSSTGSP | | GCCCAGGTAGCCCGGCTGGCTCTCCG | |
| | GASASGAPSTGGTSP | | ACTTCCACCGAGGAAGGTAGCCCGGC | |
| | SGESSTAPGSTSSTA | | TGGCTCTCCAACTTCTACTGAAGAAG | |
| | ESPGPGTSPSGESSTA | | GTACTTCTGAAAGCGCTACTCCTGAGT | |
| | PGTSESATPESGPGT | | CCGGCCCAGGTAGCCCGGCTGGCTCT | |
| | STEPSEGSAPGTSTEP | | CCGACTTCCACCGAGGAAGGTAGCCC | |
| | SEGSAPGSSPSASTG | | GGCTGGCTCTCCAACTTCTACTGAAG | |
| | TGPGSSTPSGATGSP | | AAGGTTCTACCAGCTCTACCGCTGAA | |
| | GASPGTSSTGSPGTS | | TCTCCTGGCCCAGGTTCTACTAGCGAA | |
| | TPESGSASPGTSPSGE | | TCTCCGTCTGGCACCGCACCAGGTACT | |
| | SSTAPGTSPSGESSTA | | TCCCCTAGCGGTGAATCTTCTACTGCA | |
| | PGTSESATPESGPGS | | CCAGGTTCTACCAGCGAATCTCCTTCT | |
| | EPATSGSETPGTSTEP | | GGCACCGCTCCAGGTTCTACTAGCGA | |
| | SEGSAPGSTSESPSGT | | ATCCCCGTCTGGTACCGCACCAGGTA | |
| | APGSTSESPSGTAPG | | CTTCTCCTAGCGGCGAATCTTCTACCG | |
| | TSTPESGSASPGSPA | | CACCAGGTACTTCTACCGAACCTTCCG | |
| | GSPTSTEEGTSESATP | | AGGGCAGCGCACCAGGTACTTCTGAA | |
| | ESGPGTSTEPSEGSA | | AGCGCTACCCCTGAGTCCGGCCCAGG | |
| | PGSPAGSPTSTEEGT | | TACTTCTGAAAGCGCTACTCCTGAATC | |
| | SESATPESGPGSEPA | | CGGTCCAGGTAGCGAACCGGCAACCT | |
| | TSGSETPGSSTPSGA | | CTGGCTCTGAAACCCCAGGTACCTCT | |
| | TGSPGASPGTSSTGS | | GAAAGCGCTACTCCGGAATCTGGTCC | |
| | PGSSTPSGATGSPGS | | AGGTACTTCTGAAAGCGCTACTCCGG | |
| | TSESPSGTAPGTSPSG | | AATCCGGTCCAGGTACCTCTACTGAA | |
| | ESSTAPGSTSSTAESP | | CCTTCTGAGGGCAGCGCTCCAGGTAC | |
| | GPGSSTPSGATGSPG | | TTCTGAAAGCGCTACCCCGGAGTCCG | |
| | ASPGTSSTGSPGTPG | | GTCCAGGTACTTCTACTGAACCGTCCG | |
| | SGTASSSPGSPAGSP | | AAGGTAGCGCACCAGGTACCTCCCCT | |
| | TSTEEGSPAGSPTSTE | | AGCGGCGAATCTTCTACTGCTCCAGG | |
| | EGTSTEPSEGSAPGF | | TACCTCTCCTAGCGGCGAATCTTCTAC | |
| | PTIPLSRLFDNAMLR | | CGCTCCAGGTACCTCCCCTAGCGGTG | |
| | AHRLHQLAFDTYQE | | AATCTTCTACCGCACCAGGTACTTCTA | |
| | FEEAYIPKEQKYSFL | | CCGAACCGTCCGAGGGTAGCGCACCA | |
| | QNPQTSLCFSESIPTP | | GGTAGCCCAGCAGGTTCTCCTACCTCC | |
| | SNREETQQKSNLELL | | ACCGAGGAAGGTACTTCTACCGAACC | |
| | RISLLLIQSWLEPVQF | | GTCCGAGGGTAGCGCACCAGGTTCTA | |
| | LRSVFANSLVYGAS | | GCCCTTCTGCTTCCACCGGTACCGGCC | |
| | DSNVYDLLKDLEEGI | | CAGGTAGCTCTACTCCGTCTGGTGCA | |
| | QTLMGRLEDGSPRT | | ACTGGCTCTCCAGGTAGCTCTACTCCG | |
| | GQIFKQTYSKFDTNS | | TCTGGTGCAACCGGCTCCCCAGGTAG | |
| | HNDDALLKNYGLLY | | CTCTACCCCGTCTGGTGCTACCGGCTC | |
| | CFRKDMDKVETFLRI | | TCCAGGTAGCTCTACCCCGTCTGGTGC | |
| | VQCRSVEGSCGFGG | | AACCGGCTCCCCAGGTGCATCCCCGG | |
| | SEPATSGSETPGTSES | | GTACTAGCTCTACCGGTTCTCCAGGTG | |
| | ATPESGPGSEPATSG | | CAAGCGCAAGCGGCGCGCCAAGCACG | |
| | SETPGSPAGSPTSTEE | | GGAGGTACTTCTCCGAGCGGTGAATC | |
| | GTSTEPSEGSAPGSE | | TTCTACCGCACCAGGTTCTACTAGCTC | |
| | PATSGSETPGSEPAT | | TACCGCTGAATCTCCGGGCCCAGGTA | |
| | SGSETPGSEPATSGS | | CTTCTCCGAGCGGTGAATCTTCTACTG | |
| | ETPGTSTEPSEGSAP | | CTCCAGGTACCTCTGAAAGCGCTACT | |
| | GTSESATPESGPGSE | | CCGGAGTCTGGCCCAGGTACCTCTAC | |
| | PATSGSETPGTSTEPS | | TGAACCGTCTGAGGGTAGCGCTCCAG | |
| | EGSAP | | GTACTTCTACTGAACCGTCCGAAGGT | |
| | | | AGCGCACCAGGTTCTAGCCCTTCTGC | |
| | | | ATCTACTGGTACTGGCCCAGGTAGCT | |
| | | | CTACTCCTTCTGGTGCTACCGGCTCTC | |
| | | | CAGGTGCTTCTCCGGGTACTAGCTCTA | |
| | | | CCGGTTCTCCAGGTACTTCTACTCCGG | |
| | | | AAAGCGGTTCCGCATCTCCAGGTACT | |
| | | | TCTCCTAGCGGTGAATCTTCTACTGCT | |
| | | | CCAGGTACCTCTCCTAGCGGCGAATC | |
| | | | TTCTACTGCTCCAGGTACTTCTGAAAG | |
| | | | CGCAACCCCTGAATCCGGTCCAGGTA | |
| | | | GCGAACCGGCTACTTCTGGCTCTGAG | |
| | | | ACTCCAGGTACTTCTACCGAACCGTCC | |
| | | | GAAGGTAGCGCACCAGGTTCTACCAG | |
| | | | CGAATCCCCTTCTGGTACTGCTCCAGG | |
| | | | TTCTACCAGCGAATCCCCTTCTGGCAC | |
| | | | CGCACCAGGTACTTCTACCCCTGAAA | |
| | | | GCGGCTCCGCTTCTCCAGGTAGCCCG | |
| | | | GCAGGCTCTCCGACCTCTACTGAGGA | |
| | | | AGGTACTTCTGAAAGCGCAACCCCGG | |
| | | | AGTCCGGCCCAGGTACCTCTACCGAA | |
| | | | CCGTCTGAGGGCAGCGCACCAGGTAG | |
| | | | CCCTGCTGGCTCTCCAACCTCCACCGA | |
| | | | AGAAGGTACCTCTGAAAGCGCAACCC | |
| | | | CTGAATCCGGCCCAGGTAGCGAACCG | |
| | | | GCAACCTCCGGTTCTGAAACCCCAGG | |
| | | | TAGCTCTACCCCGTCTGGTGCTACCGG | |
| | | | TTCCCCAGGTGCTTCTCCTGGTACTAG | |
| | | | CTCTACCGGTTCTCCAGGTAGCTCTAC | |
| | | | CCCGTCTGGTGCTACTGGCTCTCCAGG | |
| | | | TTCTACTAGCGAATCCCCGTCTGGTAC | |
| | | | TGCTCCAGGTACTTCCCCTAGCGGTGA | |
| | | | ATCTTCTACTGCTCCAGGTTCTACCAG | |
| | | | CTCTACCGCAGAATCTCCGGGTCCAG | |
| | | | GTAGCTCTACCCCTTCTGGTGCAACCG | |
| | | | GCTCTCCAGGTGCATCCCCGGGTACC | |
| | | | AGCTCTACCGGTTCTCCAGGTACTCCG | |
| | | | GGTAGCGGTACCGCTTCTTCCTCTCCA | |
| | | | GGTAGCCCTGCTGGCTCTCCGACTTCT | |
| | | | ACTGAGGAAGGTAGCCCGGCTGGTTC | |
| | | | TCCGACTTCTACTGAGGAAGGTACTTC | |
| | | | TACCGAACCTTCCGAAGGTAGCGCTC | |
| | | | CAGGTTTTCCGACTATTCCGCTGTCTC | |
| | | | GTCTGTTTGATAATGCTATGCTGCGTG | |
| | | | CGCACCGTCTGCACCAGCTGGCCTTTG | |
| | | | ATACTTACCAGGAATTTGAAGAAGCcT | |
| | | | ACATTCCTAAAGAGCAGAAGTACTCT | |
| | | | TTCCTGCAAAACCCACAGACTTCTCTC | |
| | | | TGCTTCAGCGAATCTATTCCGACGCCT | |
| | | | TCCAATCGCGAGGAAACTCAGCAAAA | |
| | | | GTCCAATCTGGAACTACTCCGCATTTC | |
| | | | TCTGCTTCTGATTCAGAGCTGGCTAGA | |
| | | | ACCAGTGCAATTTCTGCGTTCCGTCTT | |
| | | | CGCCAATAGCCTAGTTTATGGCGCAT | |
| | | | CCGACAGCAACGTATACGATCTCCTG | |
| | | | AAAGATCTCGAGGAAGGCATTCAGAC | |
| | | | CCTGATGGGTCGTCTCGAGGATGGCT | |
| | | | CTCCGCGTACTGGTCAGATCTTCAAGC | |
| | | | AGACTTACTCTAAATTTGATACTAACA | |
| | | | GCCACAATGACGATGCGCTTCTAAAA | |
| | | | AACTATGGTCTGCTGTATTGTTTTCGT | |
| | | | AAAGATATGGACAAAGTTGAAACCTT | |
| | | | CCTGCGTATTGTTCAGTGTCGTTCCGT | |
| | | | TGAGGGCAGCTGTGGTTTCTAAGGTG | |
| | | | GTAGCGAACCGGCAACTTCCGGCTCT | |
| | | | GAAACCCCAGGTACTTCTGAAAGCGC | |
| | | | TACTCCTGAGTCTGGCCCAGGTAGCG | |
| | | | AACCTGCTACCTCTGGCTCTGAAACCC | |
| | | | CAGGTAGCCCGGCAGGCTCTCCGACT | |
| | | | TCCACCGAGGAAGGTACCTCTACTGA | |
| | | | ACCTTCTGAGGGTAGCGCTCCAGGTA | |
| | | | GCGAACCGGCAACCTCTGGCTCTGAA | |
| | | | ACCCCAGGTAGCGAACCTGCTACCTC | |
| | | | CGGCTCTGAAACTCCAGGTAGCGAAC | |
| | | | CGGCTACTTCCGGTTCTGAAACTCCAG | |
| | | | GTACCTCTACCGAACCTTCCGAAGGC | |
| | | | AGCGCACCAGGTACTTCTGAAAGCGC | |
| | | | AACCCCTGAATCCGGTCCAGGTAGCG | |
| | | | AACCGGCTACTTCTGGCTCTGAGACTC | |
| | | | CAGGTACTTCTACCGAACCGTCCGAA | |
| | | | GGTAGCGCACCA | |
| AE48- | MAEPAGSPTSTEEGT | 763 | ATGGCTGAACCTGCTGGCTCTCCAAC | 764 |
| hGH- | PGSGTASSSPGSSTPS | | CTCCACTGAGGAAGGTACCCCGGGTA | |
| AE288 | GATGSPGASPGTSST | | GCGGTACTGCTTCTTCCTCTCCAGGTA | |
| | GSPGFPTIPLSRLFDN | | GCTCTACCCCTTCTGGTGCAACCGGCT | |
| | AMLRAHRLHQLAFD | | CTCCAGGTGCTTCTCCGGGCACCAGCT | |
| | TYQEFEEAYIPKEQK | | CTACCGGTTCTCCAGGTTTTCCGACTA | |
| | YSFLQNPQTSLCFSE | | TTCCGCTGTCTCGTCTGTTTGATAATG | |
| | SIPTPSNREETQQKS | | CTATGCTGCGTGCGCACCGTCTGCACC | |
| | NLELLRISLLLIQSWL | | AGCTGGCCTTTGATACTTACCAGGAA | |
| | EPVQFLRSVFANSLV | | TTTGAAGAAGCcTACATTCCTAAAGAG | |
| | YGASDSNVYDLLKD | | CAGAAGTACTCTTTCCTGCAAAACCC | |
| | LEEGIQTLMGRLEDG | | ACAGACTTCTCTCTGCTTCAGCGAATC | |
| | SPRTGQIFKQTYSKF | | TATTCCGACGCCTTCCAATCGCGAGG | |
| | DTNSHNDDALLKNY | | AAACTCAGCAAAAGTCCAATCTGGAA | |
| | GLLYCFRKDMDKVE | | CTACTCCGCATTTCTCTGCTTCTGATT | |
| | TFLRIVQCRSVEGSC | | CAGAGCTGGCTAGAACCAGTGCAATT | |
| | GFGGTSESATPESGP | | TCTGCGTTCCGTCTTCGCCAATAGCCT | |
| | GSEPATSGSETPGTS | | AGTTTATGGCGCATCCGACAGCAACG | |
| | ESATPESGPGSEPAT | | TATACGATCTCCTGAAAGATCTCGAG | |
| | SGSETPGTSESATPES | | GAAGGCATTCAGACCCTGATGGGTCG | |
| | GPGTSTEPSEGSAPG | | TCTCGAGGATGGCTCTCCGCGTACTG | |
| | SPAGSPTSTEEGTSES | | GTCAGATCTTCAAGCAGACTTACTCTA | |
| | ATPESGPGSEPATSG | | AATTTGATACTAACAGCCACAATGAC | |
| | SETPGTSESATPESGP | | GATGCGCTTCTAAAAAACTATGGTCT | |
| | GSPAGSPTSTEEGSP | | GCTGTATTGTTTTCGTAAAGATATGGA | |
| | AGSPTSTEEGTSTEPS | | CAAAGTTGAAACCTTCCTGCGTATTGT | |
| | EGSAPGTSESATPES | | TCAGTGTCGTTCCGTTGAGGGCAGCT | |
| | GPGTSESATPESGPG | | GTGGTTTCTAAGGTGGTACCTCTGAA | |
| | TSESATPESGPGSEP | | AGCGCAACTCCTGAGTCTGGCCCAGG | |
| | ATSGSETPGSEPATS | | TAGCGAACCTGCTACCTCCGGCTCTG | |
| | GSETPGSPAGSPTST | | AGACTCCAGGTACCTCTGAAAGCGCA | |
| | EEGTSTEPSEGSAPG | | ACCCCGGAATCTGGTCCAGGTAGCGA | |
| | TSTEPSEGSAPGSEP | | ACCTGCAACCTCTGGCTCTGAAACCC | |
| | ATSGSETPGTSESAT | | CAGGTACCTCTGAAAGCGCTACTCCT | |
| | PESGPGTSTEPSEGS | | GAATCTGGCCCAGGTACTTCTACTGA | |
| | AP | | ACCGTCCGAGGGCAGCGCACCAGGTA | |
| | | | GCCCTGCTGGCTCTCCAACCTCCACCG | |
| | | | AAGAAGGTACCTCTGAAAGCGCAACC | |
| | | | CCTGAATCCGGCCCAGGTAGCGAACC | |
| | | | GGCAACCTCCGGTTCTGAAACCCCAG | |
| | | | GTACTTCTGAAAGCGCTACTCCTGAGT | |
| | | | CCGGCCCAGGTAGCCCGGCTGGCTCT | |
| | | | CCGACTTCCACCGAGGAAGGTAGCCC | |
| | | | GGCTGGCTCTCCAACTTCTACTGAAG | |
| | | | AAGGTACTTCTACCGAACCTTCCGAG | |
| | | | GGCAGCGCACCAGGTACTTCTGAAAG | |
| | | | CGCTACCCCTGAGTCCGGCCCAGGTA | |
| | | | CTTCTGAAAGCGCTACTCCTGAATCCG | |
| | | | GTCCAGGTACTTCTGAAAGCGCTACC | |
| | | | CCGGAATCTGGCCCAGGTAGCGAACC | |
| | | | GGCTACTTCTGGTTCTGAAACCCCAG | |
| | | | GTAGCGAACCGGCTACCTCCGGTTCT | |
| | | | GAAACTCCAGGTAGCCCAGCAGGCTC | |
| | | | TCCGACTTCCACTGAGGAAGGTACTT | |
| | | | CTACTGAACCTTCCGAAGGCAGCGCA | |
| | | | CCAGGTACCTCTACTGAACCTTCTGAG | |
| | | | GGCAGCGCTCCAGGTAGCGAACCTGC | |
| | | | AACCTCTGGCTCTGAAACCCCAGGTA | |
| | | | CCTCTGAAAGCGCTACTCCTGAATCTG | |
| | | | GCCCAGGTACTTCTACTGAACCGTCC | |
| | | | GAGGGCAGCGCACCA | |
| AM48- | MAEPAGSPTSTEEGA | 765 | ATGGCTGAACCTGCTGGCTCTCCAAC | 766 |
| hGH- | SPGTSSTGSPGSSTPS | | CTCCACTGAGGAAGGTGCATCCCCGG | |
| AE288 | GATGSPGSSTPSGAT | | GCACCAGCTCTACCGGTTCTCCAGGT | |
| | GSPGFPTIPLSRLFDN | | AGCTCTACCCCGTCTGGTGCTACCGGC | |
| | AMLRAHRLHQLAFD | | TCTCCAGGTAGCTCTACCCCGTCTGGT | |
| | TYQEFEEAYIPKEQK | | GCTACTGGCTCTCCAGGTTTTCCGACT | |
| | YSFLQNPQTSLCFSE | | ATTCCGCTGTCTCGTCTGTTTGATAAT | |
| | SIPTPSNREETQQKS | | GCTATGCTGCGTGCGCACCGTCTGCA | |
| | NLELLRISLLLIQSWL | | CCAGCTGGCCTTTGATACTTACCAGG | |
| | EPVQFLRSVFANSLV | | AATTTGAAGAAGCcTACATTCCTAAAG | |
| | YGASDSNVYDLLKD | | AGCAGAAGTACTCTTTCCTGCAAAAC | |
| | LEEGIQTLMGRLEDG | | CCACAGACTTCTCTCTGCTTCAGCGAA | |
| | SPRTGQIFKQTYSKF | | TCTATTCCGACGCCTTCCAATCGCGAG | |
| | DTNSHNDDALLKNY | | GAAACTCAGCAAAAGTCCAATCTGGA | |
| | GLLYCFRKDMDKVE | | ACTACTCCGCATTTCTCTGCTTCTGAT | |
| | TFLRIVQCRSVEGSC | | TCAGAGCTGGCTAGAACCAGTGCAAT | |
| | GFGGTSESATPESGP | | TTCTGCGTTCCGTCTTCGCCAATAGCC | |
| | GSEPATSGSETPGTS | | TAGTTTATGGCGCATCCGACAGCAAC | |
| | ESATPESGPGSEPAT | | GTATACGATCTCCTGAAAGATCTCGA | |
| | SGSETPGTSESATPES | | GGAAGGCATTCAGACCCTGATGGGTC | |
| | GPGTSTEPSEGSAPG | | GTCTCGAGGATGGCTCTCCGCGTACT | |
| | SPAGSPTSTEEGTSES | | GGTCAGATCTTCAAGCAGACTTACTCT | |
| | ATPESGPGSEPATSG | | AAATTTGATACTAACAGCCACAATGA | |
| | SETPGTSESATPESGP | | CGATGCGCTTCTAAAAAACTATGGTC | |
| | GSPAGSPTSTEEGSP | | TGCTGTATTGTTTTCGTAAAGATATGG | |
| | AGSPTSTEEGTSTEPS | | ACAAAGTTGAAACCTTCCTGCGTATT | |
| | EGSAPGTSESATPES | | GTTCAGTGTCGTTCCGTTGAGGGCAG | |
| | GPGTSESATPESGPG | | CTGTGGTTTCTAAGGTGGTACCTCTGA | |
| | TSESATPESGPGSEP | | AAGCGCAACTCCTGAGTCTGGCCCAG | |
| | ATSGSETPGSEPATS | | GTAGCGAACCTGCTACCTCCGGCTCT | |
| | GSETPGSPAGSPTST | | GAGACTCCAGGTACCTCTGAAAGCGC | |
| | EEGTSTEPSEGSAPG | | AACCCCGGAATCTGGTCCAGGTAGCG | |
| | TSTEPSEGSAPGSEP | | AACCTGCAACCTCTGGCTCTGAAACC | |
| | ATSGSETPGTSESAT | | CCAGGTACCTCTGAAAGCGCTACTCC | |
| | PESGPGTSTEPSEGS | | TGAATCTGGCCCAGGTACTTCTACTGA | |
| | AP | | ACCGTCCGAGGGCAGCGCACCAGGTA | |
| | | | GCCCTGCTGGCTCTCCAACCTCCACCG | |
| | | | AAGAAGGTACCTCTGAAAGCGCAACC | |
| | | | CCTGAATCCGGCCCAGGTAGCGAACC | |
| | | | GGCAACCTCCGGTTCTGAAACCCCAG | |
| | | | GTACTTCTGAAAGCGCTACTCCTGAGT | |
| | | | CCGGCCCAGGTAGCCCGGCTGGCTCT | |
| | | | CCGACTTCCACCGAGGAAGGTAGCCC | |
| | | | GGCTGGCTCTCCAACTTCTACTGAAG | |
| | | | AAGGTACTTCTACCGAACCTTCCGAG | |
| | | | GGCAGCGCACCAGGTACTTCTGAAAG | |
| | | | CGCTACCCCTGAGTCCGGCCCAGGTA | |
| | | | CTTCTGAAAGCGCTACTCCTGAATCCG | |
| | | | GTCCAGGTACTTCTGAAAGCGCTACC | |
| | | | CCGGAATCTGGCCCAGGTAGCGAACC | |
| | | | GGCTACTTCTGGTTCTGAAACCCCAG | |
| | | | GTAGCGAACCGGCTACCTCCGGTTCT | |
| | | | GAAACTCCAGGTAGCCCAGCAGGCTC | |
| | | | TCCGACTTCCACTGAGGAAGGTACTT | |
| | | | CTACTGAACCTTCCGAAGGCAGCGCA | |
| | | | CCAGGTACCTCTACTGAACCTTCTGAG | |
| | | | GGCAGCGCTCCAGGTAGCGAACCTGC | |
| | | | AACCTCTGGCTCTGAAACCCCAGGTA | |
| | | | CCTCTGAAAGCGCTACTCCTGAATCTG | |
| | | | GCCCAGGTACTTCTACTGAACCGTCC | |
| | | | GAGGGCAGCGCACCA | |
| AE144- | GSEPATSGSETPGTS | 767 | GGTAGCGAACCGGCAACTTCCGGCTC | 768 |
| hGH- | ESATPESGPGSEPAT | | TGAAACCCCAGGTACTTCTGAAAGCG | |
| AE288 | SGSETPGSPAGSPTST | | CTACTCCTGAGTCTGGCCCAGGTAGC | |
| | EEGTSTEPSEGSAPG | | GAACCTGCTACCTCTGGCTCTGAAAC | |
| | SEPATSGSETPGSEP | | CCCAGGTAGCCCGGCAGGCTCTCCGA | |
| | ATSGSETPGSEPATS | | CTTCCACCGAGGAAGGTACCTCTACT | |
| | GSETPGTSTEPSEGS | | GAACCTTCTGAGGGTAGCGCTCCAGG | |
| | APGTSESATPESGPG | | TAGCGAACCGGCAACCTCTGGCTCTG | |
| | SEPATSGSETPGTSTE | | AAACCCCAGGTAGCGAACCTGCTACC | |
| | PSEGSAPGFPTIPLSR | | TCCGGCTCTGAAACTCCAGGTAGCGA | |
| | LFDNAMLRAHRLHQ | | ACCGGCTACTTCCGGTTCTGAAACTCC | |
| | LAFDTYQEFEEAYIP | | AGGTACCTCTACCGAACCTTCCGAAG | |
| | KEQKYSFLQNPQTSL | | GCAGCGCACCAGGTACTTCTGAAAGC | |
| | CFSESIPTPSNREETQ | | GCAACCCCTGAATCCGGTCCAGGTAG | |
| | QKSNLELLRISLLLIQ | | CGAACCGGCTACTTCTGGCTCTGAGA | |
| | SWLEPVQFLRSVFA | | CTCCAGGTACTTCTACCGAACCGTCCG | |
| | NSLVYGASDSNVYD | | AAGGTAGCGCACCAGGTTTTCCGACT | |
| | LLKDLEEGIQTLMGR | | ATTCCGCTGTCTCGTCTGTTTGATAAT | |
| | LEDGSPRTGQIFKQT | | GCTATGCTGCGTGCGCACCGTCTGCA | |
| | YSKFDTNSHNDDAL | | CCAGCTGGCCTTTGATACTTACCAGG | |
| | LKNYGLLYCFRKDM | | AATTTGAAGAAGCcTACATTCCTAAAG | |
| | DKVETFLRIVQCRSV | | AGCAGAAGTACTCTTTCCTGCAAAAC | |
| | EGSCGFGGTSESATP | | CCACAGACTTCTCTCTGCTTCAGCGAA | |
| | ESGPGSEPATSGSET | | TCTATTCCGACGCCTTCCAATCGCGAG | |
| | PGTSESATPESGPGS | | GAAACTCAGCAAAAGTCCAATCTGGA | |
| | EPATSGSETPGTSES | | ACTACTCCGCATTTCTCTGCTTCTGAT | |
| | ATPESGPGTSTEPSE | | TCAGAGCTGGCTAGAACCAGTGCAAT | |
| | GSAPGSPAGSPTSTE | | TTCTGCGTTCCGTCTTCGCCAATAGCC | |
| | EGTSESATPESGPGS | | TAGTTTATGGCGCATCCGACAGCAAC | |
| | EPATSGSETPGTSES | | GTATACGATCTCCTGAAAGATCTCGA | |
| | ATPESGPGSPAGSPT | | GGAAGGCATTCAGACCCTGATGGGTC | |
| | STEEGSPAGSPTSTEE | | GTCTCGAGGATGGCTCTCCGCGTACT | |
| | GTSTEPSEGSAPGTS | | GGTCAGATCTTCAAGCAGACTTACTCT | |
| | ESATPESGPGTSESA | | AAATTTGATACTAACAGCCACAATGA | |
| | TPESGPGTSESATPES | | CGATGCGCTTCTAAAAAACTATGGTC | |
| | GPGSEPATSGSETPG | | TGCTGTATTGTTTTCGTAAAGATATGG | |
| | SEPATSGSETPGSPA | | ACAAAGTTGAAACCTTCCTGCGTATT | |
| | GSPTSTEEGTSTEPSE | | GTTCAGTGTCGTTCCGTTGAGGGCAG | |
| | GSAPGTSTEPSEGSA | | CTGTGGTTTCTAAGGTGGTACCTCTGA | |
| | PGSEPATSGSETPGT | | AAGCGCAACTCCTGAGTCTGGCCCAG | |
| | SESATPESGPGTSTEP | | GTAGCGAACCTGCTACCTCCGGCTCT | |
| | SEGSAP | | GAGACTCCAGGTACCTCTGAAAGCGC | |
| | | | AACCCCGGAATCTGGTCCAGGTAGCG | |
| | | | AACCTGCAACCTCTGGCTCTGAAACC | |
| | | | CCAGGTACCTCTGAAAGCGCTACTCC | |
| | | | TGAATCTGGCCCAGGTACTTCTACTGA | |
| | | | ACCGTCCGAGGGCAGCGCACCAGGTA | |
| | | | GCCCTGCTGGCTCTCCAACCTCCACCG | |
| | | | AAGAAGGTACCTCTGAAAGCGCAACC | |
| | | | CCTGAATCCGGCCCAGGTAGCGAACC | |
| | | | GGCAACCTCCGGTTCTGAAACCCCAG | |
| | | | GTACTTCTGAAAGCGCTACTCCTGAGT | |
| | | | CCGGCCCAGGTAGCCCGGCTGGCTCT | |
| | | | CCGACTTCCACCGAGGAAGGTAGCCC | |
| | | | GGCTGGCTCTCCAACTTCTACTGAAG | |
| | | | AAGGTACTTCTACCGAACCTTCCGAG | |
| | | | GGCAGCGCACCAGGTACTTCTGAAAG | |
| | | | CGCTACCCCTGAGTCCGGCCCAGGTA | |
| | | | CTTCTGAAAGCGCTACTCCTGAATCCG | |
| | | | GTCCAGGTACTTCTGAAAGCGCTACC | |
| | | | CCGGAATCTGGCCCAGGTAGCGAACC | |
| | | | GGCTACTTCTGGTTCTGAAACCCCAG | |
| | | | GTAGCGAACCGGCTACCTCCGGTTCT | |
| | | | GAAACTCCAGGTAGCCCAGCAGGCTC | |
| | | | TCCGACTTCCACTGAGGAAGGTACTT | |
| | | | CTACTGAACCTTCCGAAGGCAGCGCA | |
| | | | CCAGGTACCTCTACTGAACCTTCTGAG | |
| | | | GGCAGCGCTCCAGGTAGCGAACCTGC | |
| | | | AACCTCTGGCTCTGAAACCCCAGGTA | |
| | | | CCTCTGAAAGCGCTACTCCTGAATCTG | |
| | | | GCCCAGGTACTTCTACTGAACCGTCC | |
| | | | GAGGGCAGCGCACCA | |
| AE288- | GTSESATPESGPGSE | 769 | GGTACCTCTGAAAGCGCAACTCCTGA | 770 |
| hGH- | PATSGSETPGTSESA | | GTCTGGCCCAGGTAGCGAACCTGCTA | |
| AE288 | TPESGPGSEPATSGS | | CCTCCGGCTCTGAGACTCCAGGTACCT | |
| | ETPGTSESATPESGP | | CTGAAAGCGCAACCCCGGAATCTGGT | |
| | GTSTEPSEGSAPGSP | | CCAGGTAGCGAACCTGCAACCTCTGG | |
| | AGSPTSTEEGTSESA | | CTCTGAAACCCCAGGTACCTCTGAAA | |
| | TPESGPGSEPATSGS | | GCGCTACTCCTGAATCTGGCCCAGGT | |
| | ETPGTSESATPESGP | | ACTTCTACTGAACCGTCCGAGGGCAG | |
| | GSPAGSPTSTEEGSP | | CGCACCAGGTAGCCCTGCTGGCTCTC | |
| | AGSPTSTEEGTSTEPS | | CAACCTCCACCGAAGAAGGTACCTCT | |
| | EGSAPGTSESATPES | | GAAAGCGCAACCCCTGAATCCGGCCC | |
| | GPGTSESATPESGPG | | AGGTAGCGAACCGGCAACCTCCGGTT | |
| | TSESATPESGPGSEP | | CTGAAACCCCAGGTACTTCTGAAAGC | |
| | ATSGSETPGSEPATS | | GCTACTCCTGAGTCCGGCCCAGGTAG | |
| | GSETPGSPAGSPTST | | CCCGGCTGGCTCTCCGACTTCCACCGA | |
| | EEGTSTEPSEGSAPG | | GGAAGGTAGCCCGGCTGGCTCTCCAA | |
| | TSTEPSEGSAPGSEP | | CTTCTACTGAAGAAGGTACTTCTACCG | |
| | ATSGSETPGTSESAT | | AACCTTCCGAGGGCAGCGCACCAGGT | |
| | PESGPGTSTEPSEGS | | ACTTCTGAAAGCGCTACCCCTGAGTC | |
| | APGFPTIPLSRLFDNA | | CGGCCCAGGTACTTCTGAAAGCGCTA | |
| | MLRAHRLHQLAFDT | | CTCCTGAATCCGGTCCAGGTACTTCTG | |
| | YQEFEEAYIPKEQKY | | AAAGCGCTACCCCGGAATCTGGCCCA | |
| | SFLQNPQTSLCFSESI | | GGTAGCGAACCGGCTACTTCTGGTTCT | |
| | PTPSNREETQQKSNL | | GAAACCCCAGGTAGCGAACCGGCTAC | |
| | ELLRISLLLIQSWLEP | | CTCCGGTTCTGAAACTCCAGGTAGCC | |
| | VQFLRSVFANSLVY | | CAGCAGGCTCTCCGACTTCCACTGAG | |
| | GASDSNVYDLLKDL | | GAAGGTACTTCTACTGAACCTTCCGA | |
| | EEGIQTLMGRLEDGS | | AGGCAGCGCACCAGGTACCTCTACTG | |
| | PRTGQIFKQTYSKFD | | AACCTTCTGAGGGCAGCGCTCCAGGT | |
| | TNSHNDDALLKNYG | | AGCGAACCTGCAACCTCTGGCTCTGA | |
| | LLYCFRKDMDKVET | | AACCCCAGGTACCTCTGAAAGCGCTA | |
| | FLRIVQCRSVEGSCG | | CTCCTGAATCTGGCCCAGGTACTTCTA | |
| | FGGTSESATPESGPG | | CTGAACCGTCCGAGGGCAGCGCACCA | |
| | SEPATSGSETPGTSES | | GGTTTTCCGACTATTCCGCTGTCTCGT | |
| | ATPESGPGSEPATSG | | CTGTTTGATAATGCTATGCTGCGTGCG | |
| | SETPGTSESATPESGP | | CACCGTCTGCACCAGCTGGCCTTTGAT | |
| | GTSTEPSEGSAPGSP | | ACTTACCAGGAATTTGAAGAAGCcTA | |
| | AGSPTSTEEGTSESA | | CATTCCTAAAGAGCAGAAGTACTCTT | |
| | TPESGPGSEPATSGS | | TCCTGCAAAACCCACAGACTTCTCTCT | |
| | ETPGTSESATPESGP | | GCTTCAGCGAATCTATTCCGACGCCTT | |
| | GSPAGSPTSTEEGSP | | CCAATCGCGAGGAAACTCAGCAAAAG | |
| | AGSPTSTEEGTSTEPS | | TCCAATCTGGAACTACTCCGCATTTCT | |
| | EGSAPGTSESATPES | | CTGCTTCTGATTCAGAGCTGGCTAGA | |
| | GPGTSESATPESGPG | | ACCAGTGCAATTTCTGCGTTCCGTCTT | |
| | TSESATPESGPGSEP | | CGCCAATAGCCTAGTTTATGGCGCAT | |
| | ATSGSETPGSEPATS | | CCGACAGCAACGTATACGATCTCCTG | |
| | GSETPGSPAGSPTST | | AAAGATCTCGAGGAAGGCATTCAGAC | |
| | EEGTSTEPSEGSAPG | | CCTGATGGGTCGTCTCGAGGATGGCT | |
| | TSTEPSEGSAPGSEP | | CTCCGCGTACTGGTCAGATCTTCAAGC | |
| | ATSGSETPGTSESAT | | AGACTTACTCTAAATTTGATACTAACA | |
| | PESGPGTSTEPSEGS | | GCCACAATGACGATGCGCTTCTAAAA | |
| | AP | | AACTATGGTCTGCTGTATTGTTTTCGT | |
| | | | AAAGATATGGACAAAGTTGAAACCTT | |
| | | | CCTGCGTATTGTTCAGTGTCGTTCCGT | |
| | | | TGAGGGCAGCTGTGGTTTCTAAGGTG | |
| | | | GTACCTCTGAAAGCGCAACTCCTGAG | |
| | | | TCTGGCCCAGGTAGCGAACCTGCTAC | |
| | | | CTCCGGCTCTGAGACTCCAGGTACCTC | |
| | | | TGAAAGCGCAACCCCGGAATCTGGTC | |
| | | | CAGGTAGCGAACCTGCAACCTCTGGC | |
| | | | TCTGAAACCCCAGGTACCTCTGAAAG | |
| | | | CGCTACTCCTGAATCTGGCCCAGGTA | |
| | | | CTTCTACTGAACCGTCCGAGGGCAGC | |
| | | | GCACCAGGTAGCCCTGCTGGCTCTCC | |
| | | | AACCTCCACCGAAGAAGGTACCTCTG | |
| | | | AAAGCGCAACCCCTGAATCCGGCCCA | |
| | | | GGTAGCGAACCGGCAACCTCCGGTTC | |
| | | | TGAAACCCCAGGTACTTCTGAAAGCG | |
| | | | CTACTCCTGAGTCCGGCCCAGGTAGC | |
| | | | CCGGCTGGCTCTCCGACTTCCACCGA | |
| | | | GGAAGGTAGCCCGGCTGGCTCTCCAA | |
| | | | CTTCTACTGAAGAAGGTACTTCTACCG | |
| | | | AACCTTCCGAGGGCAGCGCACCAGGT | |
| | | | ACTTCTGAAAGCGCTACCCCTGAGTC | |
| | | | CGGCCCAGGTACTTCTGAAAGCGCTA | |
| | | | CTCCTGAATCCGGTCCAGGTACTTCTG | |
| | | | AAAGCGCTACCCCGGAATCTGGCCCA | |
| | | | GGTAGCGAACCGGCTACTTCTGGTTCT | |
| | | | GAAACCCCAGGTAGCGAACCGGCTAC | |
| | | | CTCCGGTTCTGAAACTCCAGGTAGCC | |
| | | | CAGCAGGCTCTCCGACTTCCACTGAG | |
| | | | GAAGGTACTTCTACTGAACCTTCCGA | |
| | | | AGGCAGCGCACCAGGTACCTCTACTG | |
| | | | AACCTTCTGAGGGCAGCGCTCCAGGT | |
| | | | AGCGAACCTGCAACCTCTGGCTCTGA | |
| | | | AACCCCAGGTACCTCTGAAAGCGCTA | |
| | | | CTCCTGAATCTGGCCCAGGTACTTCTA | |
| | | | CTGAACCGTCCGAGGGCAGCGCACCA | |
| AF144- | GTSTPESGSASPGTSP | 771 | GGTACTTCTACTCCGGAAAGCGGTTC | 772 |
| hGH- | SGESSTAPGTSPSGES | | CGCATCTCCAGGTACTTCTCCTAGCGG | |
| AE288 | STAPGSTSSTAESPGP | | TGAATCTTCTACTGCTCCAGGTACCTC | |
| | GSTSESPSGTAPGSTS | | TCCTAGCGGCGAATCTTCTACTGCTCC | |
| | STAESPGPGTSPSGES | | AGGTTCTACCAGCTCTACCGCTGAATC | |
| | STAPGTSTPESGSASP | | TCCTGGCCCAGGTTCTACCAGCGAAT | |
| | GSTSSTAESPGPGTSP | | CCCCGTCTGGCACCGCACCAGGTTCT | |
| | SGESSTAPGTSPSGES | | ACTAGCTCTACCGCAGAATCTCCGGG | |
| | STAPGTSPSGESSTAP | | TCCAGGTACTTCCCCTAGCGGTGAATC | |
| | GFPTIPLSRLFDNAM | | TTCTACTGCTCCAGGTACCTCTACTCC | |
| | LRAHRLHQLAFDTY | | GGAAAGCGGCTCCGCATCTCCAGGTT | |
| | QEFEEAYIPKEQKYS | | CTACTAGCTCTACTGCTGAATCTCCTG | |
| | FLQNPQTSLCFSESIP | | GTCCAGGTACCTCCCCTAGCGGCGAA | |
| | TPSNREETQQKSNLE | | TCTTCTACTGCTCCAGGTACCTCTCCT | |
| | LLRISLLLIQSWLEPV | | AGCGGCGAATCTTCTACCGCTCCAGG | |
| | QFLRSVFANSLVYG | | TACCTCCCCTAGCGGTGAATCTTCTAC | |
| | ASDSNVYDLLKDLE | | CGCACCAGGTTTTCCGACTATTCCGCT | |
| | EGIQTLMGRLEDGSP | | GTCTCGTCTGTTTGATAATGCTATGCT | |
| | RTGQIFKQTYSKFDT | | GCGTGCGCACCGTCTGCACCAGCTGG | |
| | NSHNDDALLKNYGL | | CCTTTGATACTTACCAGGAATTTGAAG | |
| | LYCFRKDMDKVETF | | AAGCcTACATTCCTAAAGAGCAGAAG | |
| | LRIVQCRSVEGSCGF | | TACTCTTTCCTGCAAAACCCACAGACT | |
| | GGTSESATPESGPGS | | TCTCTCTGCTTCAGCGAATCTATTCCG | |
| | EPATSGSETPGTSES | | ACGCCTTCCAATCGCGAGGAAACTCA | |
| | ATPESGPGSEPATSG | | GCAAAAGTCCAATCTGGAACTACTCC | |
| | SETPGTSESATPESGP | | GCATTTCTCTGCTTCTGATTCAGAGCT | |
| | GTSTEPSEGSAPGSP | | GGCTAGAACCAGTGCAATTTCTGCGT | |
| | AGSPTSTEEGTSESA | | TCCGTCTTCGCCAATAGCCTAGTTTAT | |
| | TPESGPGSEPATSGS | | GGCGCATCCGACAGCAACGTATACGA | |
| | ETPGTSESATPESGP | | TCTCCTGAAAGATCTCGAGGAAGGCA | |
| | GSPAGSPTSTEEGSP | | TTCAGACCCTGATGGGTCGTCTCGAG | |
| | AGSPTSTEEGTSTEPS | | GATGGCTCTCCGCGTACTGGTCAGAT | |
| | EGSAPGTSESATPES | | CTTCAAGCAGACTTACTCTAAATTTGA | |
| | GPGTSESATPESGPG | | TACTAACAGCCACAATGACGATGCGC | |
| | TSESATPESGPGSEP | | TTCTAAAAAACTATGGTCTGCTGTATT | |
| | ATSGSETPGSEPATS | | GTTTTCGTAAAGATATGGACAAAGTT | |
| | GSETPGSPAGSPTST | | GAAACCTTCCTGCGTATTGTTCAGTGT | |
| | EEGTSTEPSEGSAPG | | CGTTCCGTTGAGGGCAGCTGTGGTTTC | |
| | TSTEPSEGSAPGSEP | | TAAGGTGGTACCTCTGAAAGCGCAAC | |
| | ATSGSETPGTSESAT | | TCCTGAGTCTGGCCCAGGTAGCGAAC | |
| | PESGPGTSTEPSEGS | | CTGCTACCTCCGGCTCTGAGACTCCAG | |
| | AP | | GTACCTCTGAAAGCGCAACCCCGGAA | |
| | | | TCTGGTCCAGGTAGCGAACCTGCAAC | |
| | | | CTCTGGCTCTGAAACCCCAGGTACCTC | |
| | | | TGAAAGCGCTACTCCTGAATCTGGCC | |
| | | | CAGGTACTTCTACTGAACCGTCCGAG | |
| | | | GGCAGCGCACCAGGTAGCCCTGCTGG | |
| | | | CTCTCCAACCTCCACCGAAGAAGGTA | |
| | | | CCTCTGAAAGCGCAACCCCTGAATCC | |
| | | | GGCCCAGGTAGCGAACCGGCAACCTC | |
| | | | CGGTTCTGAAACCCCAGGTACTTCTG | |
| | | | AAAGCGCTACTCCTGAGTCCGGCCCA | |
| | | | GGTAGCCCGGCTGGCTCTCCGACTTCC | |
| | | | ACCGAGGAAGGTAGCCCGGCTGGCTC | |
| | | | TCCAACTTCTACTGAAGAAGGTACTTC | |
| | | | TACCGAACCTTCCGAGGGCAGCGCAC | |
| | | | CAGGTACTTCTGAAAGCGCTACCCCT | |
| | | | GAGTCCGGCCCAGGTACTTCTGAAAG | |
| | | | CGCTACTCCTGAATCCGGTCCAGGTA | |
| | | | CTTCTGAAAGCGCTACCCCGGAATCT | |
| | | | GGCCCAGGTAGCGAACCGGCTACTTC | |
| | | | TGGTTCTGAAACCCCAGGTAGCGAAC | |
| | | | CGGCTACCTCCGGTTCTGAAACTCCA | |
| | | | GGTAGCCCAGCAGGCTCTCCGACTTC | |
| | | | CACTGAGGAAGGTACTTCTACTGAAC | |
| | | | CTTCCGAAGGCAGCGCACCAGGTACC | |
| | | | TCTACTGAACCTTCTGAGGGCAGCGC | |
| | | | TCCAGGTAGCGAACCTGCAACCTCTG | |
| | | | GCTCTGAAACCCCAGGTACCTCTGAA | |
| | | | AGCGCTACTCCTGAATCTGGCCCAGG | |
| | | | TACTTCTACTGAACCGTCCGAGGGCA | |
| | | | GCGCACCA | |
| AD576- | GSSESGSSEGGPGSG | 773 | GGTTCCTCTGAAAGCGGTTCTTCCGAA | 774 |
| hGH- | GEPSESGSSGSSESGS | | GGTGGTCCAGGTTCCTCTGAAAGCGG | |
| AE288 | SEGGPGSSESGSSEG | | TTCTTCTGAGGGTGGTCCAGGTGAATC | |
| | GPGSSESGSSEGGPG | | TCCGGGTGGCTCCAGCGGTTCCGAGT | |
| | SSESGSSEGGPGSSES | | CAGGTTCTGGTGGCGAACCTTCCGAG | |
| | GSSEGGPGESPGGSS | | TCTGGTAGCTCAGGTGAATCTCCGGG | |
| | GSESGSEGSSGPGES | | TGGTTCTAGCGGTTCCGAGTCAGGTG | |
| | SGSSESGSSEGGPGS | | AATCTCCGGGTGGTTCCAGCGGTTCTG | |
| | SESGSSEGGPGSSES | | AGTCAGGTTCCTCCGAAAGCGGTTCTT | |
| | GSSEGGPGSGGEPSE | | CTGAGGGCGGTCCAGGTTCCTCCGAA | |
| | SGSSGESPGGSSGSE | | AGCGGTTCTTCCGAGGGCGGTCCAGG | |
| | SGESPGGSSGSESGS | | TTCTTCTGAAAGCGGTTCTTCCGAGGG | |
| | GGEPSESGSSGSSES | | CGGTCCAGGTGAATCTCCTGGTGGTTC | |
| | GSSEGGPGSGGEPSE | | CAGCGGTTCCGAGTCAGGTGAATCTC | |
| | SGSSGSGGEPSESGS | | CAGGTGGCTCTAGCGGTTCCGAGTCA | |
| | SGSEGSSGPGESSGE | | GGTGAATCTCCTGGTGGTTCTAGCGGT | |
| | SPGGSSGSESGSGGE | | TCTGAATCAGGTTCCTCCGAAAGCGG | |
| | PSESGSSGSGGEPSES | | TTCTTCTGAGGGCGGTCCAGGTTCCTC | |
| | GSSGSGGEPSESGSS | | CGAAAGCGGTTCTTCCGAGGGCGGTC | |
| | GSSESGSSEGGPGES | | CAGGTTCTTCTGAAAGCGGTTCTTCCG | |
| | PGGSSGSESGESPGG | | AGGGCGGTCCAGGTTCCTCTGAAAGC | |
| | SSGSESGESPGGSSG | | GGTTCTTCTGAGGGCGGTCCAGGTTCT | |
| | SESGESPGGSSGSES | | TCCGAAAGCGGTTCTTCCGAGGGCGG | |
| | GESPGGSSGSESGSS | | TCCAGGTTCTTCCGAAAGCGGTTCTTC | |
| | ESGSSEGGPGSGGEP | | TGAAGGCGGTCCAGGTTCTGGTGGCG | |
| | SESGSSGSEGSSGPG | | AACCGTCCGAGTCTGGTAGCTCAGGT | |
| | ESSGSSESGSSEGGP | | GAATCTCCGGGTGGCTCTAGCGGTTC | |
| | GSGGEPSESGSSGSS | | CGAGTCAGGTGAATCTCCTGGTGGTT | |
| | ESGSSEGGPGSGGEP | | CCAGCGGTTCCGAGTCAGGTTCCGGT | |
| | SESGSSGESPGGSSG | | GGCGAACCGTCCGAATCTGGTAGCTC | |
| | SESGESPGGSSGSES | | AGGTAGCGAAGGTTCTTCTGGTCCAG | |
| | GSSESGSSEGGPGSG | | GCGAATCTTCAGGTTCCTCTGAAAGC | |
| | GEPSESGSSGSSESGS | | GGTTCTTCTGAGGGCGGTCCAGGTTCC | |
| | SEGGPGSGGEPSESG | | GGTGGCGAACCGTCCGAATCTGGTAG | |
| | SSGSGGEPSESGSSG | | CTCAGGTAGCGAAGGTTCTTCTGGTCC | |
| | ESPGGSSGSESGSEG | | AGGCGAATCTTCAGGTTCCTCTGAAA | |
| | SSGPGESSGSSESGSS | | GCGGTTCTTCTGAGGGCGGTCCAGGT | |
| | EGGPGSEGSSGPGES | | TCCGGTGGCGAACCTTCCGAATCTGG | |
| | SGFPTIPLSRLFDNA | | TAGCTCAGGTGAATCTCCGGGTGGTT | |
| | MLRAHRLHQLAFDT | | CTAGCGGTTCTGAGTCAGGTTCTGGTG | |
| | YQEFEEAYIPKEQKY | | GTGAACCTTCCGAGTCTGGTAGCTCA | |
| | SFLQNPQTSLCFSESI | | GGTTCTGGTGGCGAACCATCCGAGTC | |
| | PTPSNREETQQKSNL | | TGGTAGCTCAGGTTCTTCCGAAAGCG | |
| | ELLRISLLLIQSWLEP | | GTTCTTCCGAAGGCGGTCCAGGTTCTG | |
| | VQFLRSVFANSLVY | | GTGGTGAACCGTCCGAATCTGGTAGC | |
| | GASDSNVYDLLKDL | | TCAGGTTCTGGTGGCGAACCATCCGA | |
| | EEGIQTLMGRLEDGS | | ATCTGGTAGCTCAGGTAGCGAAGGTT | |
| | PRTGQIFKQTYSKFD | | CTTCTGGTCCTGGCGAATCTTCAGGTG | |
| | TNSHNDDALLKNYG | | AATCTCCAGGTGGCTCTAGCGGTTCC | |
| | LLYCFRKDMDKVET | | GAATCAGGTAGCGAAGGTTCTTCCGG | |
| | FLRIVQCRSVEGSCG | | TCCAGGTGAATCTTCAGGTAGCGAAG | |
| | FGGTSESATPESGPG | | GTTCTTCTGGTCCTGGTGAATCCTCAG | |
| | SEPATSGSETPGTSES | | GTTCCGGTGGCGAACCATCTGAATCT | |
| | ATPESGPGSEPATSG | | GGTAGCTCAGGTTCCTCTGAAAGCGG | |
| | SETPGTSESATPESGP | | TTCTTCCGAAGGTGGTCCAGGTTCCTC | |
| | GTSTEPSEGSAPGSP | | TGAAAGCGGTTCTTCTGAGGGTGGTC | |
| | AGSPTSTEEGTSESA | | CAGGTGAATCTCCGGGTGGCTCCAGC | |
| | TPESGPGSEPATSGS | | GGTTCCGAGTCAGGTTCTGGTGGCGA | |
| | ETPGTSESATPESGP | | ACCATCCGAATCTGGTAGCTCAGGTA | |
| | GSPAGSPTSTEEGSP | | GCGAAGGTTCTTCTGGTCCTGGCGAA | |
| | AGSPTSTEEGTSTEPS | | TCTTCAGGTGAATCTCCAGGTGGCTCT | |
| | EGSAPGTSESATPES | | AGCGGTTCCGAATCAGGTAGCGAAGG | |
| | GPGTSESATPESGPG | | TTCTTCCGGTCCTGGTGAGTCTTCAGG | |
| | TSESATPESGPGSEP | | TGAATCTCCAGGTGGCTCTAGCGGTTC | |
| | ATSGSETPGSEPATS | | CGAGTCAGGTAGCGAAGGTTCTTCTG | |
| | GSETPGSPAGSPTST | | GTCCTGGCGAGTCCTCAGGTTTTCCGA | |
| | EEGTSTEPSEGSAPG | | CTATTCCGCTGTCTCGTCTGTTTGATA | |
| | TSTEPSEGSAPGSEP | | ATGCTATGCTGCGTGCGCACCGTCTGC | |
| | ATSGSETPGTSESAT | | ACCAGCTGGCCTTTGATACTTACCAG | |
| | PESGPGTSTEPSEGS | | GAATTTGAAGAAGCcTACATTCCTAAA | |
| | AP | | GAGCAGAAGTACTCTTTCCTGCAAAA | |
| | | | CCCACAGACTTCTCTCTGCTTCAGCGA | |
| | | | ATCTATTCCGACGCCTTCCAATCGCGA | |
| | | | GGAAACTCAGCAAAAGTCCAATCTGG | |
| | | | AACTACTCCGCATTTCTCTGCTTCTGA | |
| | | | TTCAGAGCTGGCTAGAACCAGTGCAA | |
| | | | TTTCTGCGTTCCGTCTTCGCCAATAGC | |
| | | | CTAGTTTATGGCGCATCCGACAGCAA | |
| | | | CGTATACGATCTCCTGAAAGATCTCG | |
| | | | AGGAAGGCATTCAGACCCTGATGGGT | |
| | | | CGTCTCGAGGATGGCTCTCCGCGTACT | |
| | | | GGTCAGATCTTCAAGCAGACTTACTCT | |
| | | | AAATTTGATACTAACAGCCACAATGA | |
| | | | CGATGCGCTTCTAAAAAACTATGGTC | |
| | | | TGCTGTATTGTTTTCGTAAAGATATGG | |
| | | | ACAAAGTTGAAACCTTCCTGCGTATT | |
| | | | GTTCAGTGTCGTTCCGTTGAGGGCAG | |
| | | | CTGTGGTTTCTAAGGTGGTACCTCTGA | |
| | | | AAGCGCAACTCCTGAGTCTGGCCCAG | |
| | | | GTAGCGAACCTGCTACCTCCGGCTCT | |
| | | | GAGACTCCAGGTACCTCTGAAAGCGC | |
| | | | AACCCCGGAATCTGGTCCAGGTAGCG | |
| | | | AACCTGCAACCTCTGGCTCTGAAACC | |
| | | | CCAGGTACCTCTGAAAGCGCTACTCC | |
| | | | TGAATCTGGCCCAGGTACTTCTACTGA | |
| | | | ACCGTCCGAGGGCAGCGCACCAGGTA | |
| | | | GCCCTGCTGGCTCTCCAACCTCCACCG | |
| | | | AAGAAGGTACCTCTGAAAGCGCAACC | |
| | | | CCTGAATCCGGCCCAGGTAGCGAACC | |
| | | | GGCAACCTCCGGTTCTGAAACCCCAG | |
| | | | GTACTTCTGAAAGCGCTACTCCTGAGT | |
| | | | CCGGCCCAGGTAGCCCGGCTGGCTCT | |
| | | | CCGACTTCCACCGAGGAAGGTAGCCC | |
| | | | GGCTGGCTCTCCAACTTCTACTGAAG | |
| | | | AAGGTACTTCTACCGAACCTTCCGAG | |
| | | | GGCAGCGCACCAGGTACTTCTGAAAG | |
| | | | CGCTACCCCTGAGTCCGGCCCAGGTA | |
| | | | CTTCTGAAAGCGCTACTCCTGAATCCG | |
| | | | GTCCAGGTACTTCTGAAAGCGCTACC | |
| | | | CCGGAATCTGGCCCAGGTAGCGAACC | |
| | | | GGCTACTTCTGGTTCTGAAACCCCAG | |
| | | | GTAGCGAACCGGCTACCTCCGGTTCT | |
| | | | GAAACTCCAGGTAGCCCAGCAGGCTC | |
| | | | TCCGACTTCCACTGAGGAAGGTACTT | |
| | | | CTACTGAACCTTCCGAAGGCAGCGCA | |
| | | | CCAGGTACCTCTACTGAACCTTCTGAG | |
| | | | GGCAGCGCTCCAGGTAGCGAACCTGC | |
| | | | AACCTCTGGCTCTGAAACCCCAGGTA | |
| | | | CCTCTGAAAGCGCTACTCCTGAATCTG | |
| | | | GCCCAGGTACTTCTACTGAACCGTCC | |
| | | | GAGGGCAGCGCACCA | |
| AE576- | GSPAGSPTSTEEGTS | 775 | GGTAGCCCGGCTGGCTCTCCTACCTCT | 776 |
| hGH- | ESATPESGPGTSTEPS | | ACTGAGGAAGGTACTTCTGAAAGCGC | |
| AE288 | EGSAPGSPAGSPTST | | TACTCCTGAGTCTGGTCCAGGTACCTC | |
| | EEGTSTEPSEGSAPG | | TACTGAACCGTCCGAAGGTAGCGCTC | |
| | TSTEPSEGSAPGTSES | | CAGGTAGCCCAGCAGGCTCTCCGACT | |
| | ATPESGPGSEPATSG | | TCCACTGAGGAAGGTACTTCTACTGA | |
| | SETPGSEPATSGSETP | | ACCTTCCGAAGGCAGCGCACCAGGTA | |
| | GSPAGSPTSTEEGTS | | CCTCTACTGAACCTTCTGAGGGCAGC | |
| | ESATPESGPGTSTEPS | | GCTCCAGGTACTTCTGAAAGCGCTAC | |
| | EGSAPGTSTEPSEGS | | CCCGGAATCTGGCCCAGGTAGCGAAC | |
| | APGSPAGSPTSTEEG | | CGGCTACTTCTGGTTCTGAAACCCCAG | |
| | TSTEPSEGSAPGTSTE | | GTAGCGAACCGGCTACCTCCGGTTCT | |
| | PSEGSAPGTSESATP | | GAAACTCCAGGTAGCCCGGCAGGCTC | |
| | ESGPGTSTEPSEGSA | | TCCGACCTCTACTGAGGAAGGTACTT | |
| | PGTSESATPESGPGS | | CTGAAAGCGCAACCCCGGAGTCCGGC | |
| | EPATSGSETPGTSTEP | | CCAGGTACCTCTACCGAACCGTCTGA | |
| | SEGSAPGTSTEPSEG | | GGGCAGCGCACCAGGTACTTCTACCG | |
| | SAPGTSESATPESGP | | AACCGTCCGAGGGTAGCGCACCAGGT | |
| | GTSESATPESGPGSP | | AGCCCAGCAGGTTCTCCTACCTCCACC | |
| | AGSPTSTEEGTSESA | | GAGGAAGGTACTTCTACCGAACCGTC | |
| | TPESGPGSEPATSGS | | CGAGGGTAGCGCACCAGGTACCTCTA | |
| | ETPGTSESATPESGP | | CTGAACCTTCTGAGGGCAGCGCTCCA | |
| | GTSTEPSEGSAPGTS | | GGTACTTCTGAAAGCGCTACCCCGGA | |
| | TEPSEGSAPGTSTEPS | | GTCCGGTCCAGGTACTTCTACTGAACC | |
| | EGSAPGTSTEPSEGS | | GTCCGAAGGTAGCGCACCAGGTACTT | |
| | APGTSTEPSEGSAPG | | CTGAAAGCGCAACCCCTGAATCCGGT | |
| | TSTEPSEGSAPGSPA | | CCAGGTAGCGAACCGGCTACTTCTGG | |
| | GSPTSTEEGTSTEPSE | | CTCTGAGACTCCAGGTACTTCTACCGA | |
| | GSAPGTSESATPESG | | ACCGTCCGAAGGTAGCGCACCAGGTA | |
| | PGSEPATSGSETPGT | | CTTCTACTGAACCGTCTGAAGGTAGC | |
| | SESATPESGPGSEPA | | GCACCAGGTACTTCTGAAAGCGCAAC | |
| | TSGSETPGTSESATPE | | CCCGGAATCCGGCCCAGGTACCTCTG | |
| | SGPGTSTEPSEGSAP | | AAAGCGCAACCCCGGAGTCCGGCCCA | |
| | GTSESATPESGPGSP | | GGTAGCCCTGCTGGCTCTCCAACCTCC | |
| | AGSPTSTEEGSPAGS | | ACCGAAGAAGGTACCTCTGAAAGCGC | |
| | PTSTEEGSPAGSPTST | | AACCCCTGAATCCGGCCCAGGTAGCG | |
| | EEGTSESATPESGPG | | AACCGGCAACCTCCGGTTCTGAAACC | |
| | TSTEPSEGSAPGFPTI | | CCAGGTACCTCTGAAAGCGCTACTCC | |
| | PLSRLFDNAMLRAH | | GGAGTCTGGCCCAGGTACCTCTACTG | |
| | RLHQLAFDTYQEFEE | | AACCGTCTGAGGGTAGCGCTCCAGGT | |
| | AYIPKEQKYSFLQNP | | ACTTCTACTGAACCGTCCGAAGGTAG | |
| | QTSLCFSESIPTPSNR | | CGCACCAGGTACTTCTACCGAACCGT | |
| | EETQQKSNLELLRIS | | CCGAAGGCAGCGCTCCAGGTACCTCT | |
| | LLLIQSWLEPVQFLR | | ACTGAACCTTCCGAGGGCAGCGCTCC | |
| | SVFANSLVYGASDS | | AGGTACCTCTACCGAACCTTCTGAAG | |
| | NVYDLLKDLEEGIQT | | GTAGCGCACCAGGTACTTCTACCGAA | |
| | LMGRLEDGSPRTGQI | | CCGTCCGAGGGTAGCGCACCAGGTAG | |
| | FKQTYSKFDTNSHN | | CCCAGCAGGTTCTCCTACCTCCACCGA | |
| | DDALLKNYGLLYCF | | GGAAGGTACTTCTACCGAACCGTCCG | |
| | RKDMDKVETFLRIV | | AGGGTAGCGCACCAGGTACCTCTGAA | |
| | QCRSVEGSCGFGGTS | | AGCGCAACTCCTGAGTCTGGCCCAGG | |
| | ESATPESGPGSEPAT | | TAGCGAACCTGCTACCTCCGGCTCTG | |
| | SGSETPGTSESATPES | | AGACTCCAGGTACCTCTGAAAGCGCA | |
| | GPGSEPATSGSETPG | | ACCCCGGAATCTGGTCCAGGTAGCGA | |
| | TSESATPESGPGTSTE | | ACCTGCAACCTCTGGCTCTGAAACCC | |
| | PSEGSAPGSPAGSPT | | CAGGTACCTCTGAAAGCGCTACTCCT | |
| | STEEGTSESATPESGP | | GAATCTGGCCCAGGTACTTCTACTGA | |
| | GSEPATSGSETPGTS | | ACCGTCCGAGGGCAGCGCACCAGGTA | |
| | ESATPESGPGSPAGS | | CTTCTGAAAGCGCTACTCCTGAGTCCG | |
| | PTSTEEGSPAGSPTST | | GCCCAGGTAGCCCGGCTGGCTCTCCG | |
| | EEGTSTEPSEGSAPG | | ACTTCCACCGAGGAAGGTAGCCCGGC | |
| | TSESATPESGPGTSES | | TGGCTCTCCAACTTCTACTGAAGAAG | |
| | ATPESGPGTSESATP | | GTAGCCCGGCAGGCTCTCCGACCTCT | |
| | ESGPGSEPATSGSET | | ACTGAGGAAGGTACTTCTGAAAGCGC | |
| | PGSEPATSGSETPGSP | | AACCCCGGAGTCCGGCCCAGGTACCT | |
| | AGSPTSTEEGTSTEPS | | CTACCGAACCGTCTGAGGGCAGCGCA | |
| | EGSAPGTSTEPSEGS | | CCAGGTTTTCCGACTATTCCGCTGTCT | |
| | APGSEPATSGSETPG | | CGTCTGTTTGATAATGCTATGCTGCGT | |
| | TSESATPESGPGTSTE | | GCGCACCGTCTGCACCAGCTGGCCTTT | |
| | PSEGSAP | | GATACTTACCAGGAATTTGAAGAAGC | |
| | | | cTACATTCCTAAAGAGCAGAAGTACTC | |
| | | | TTTCCTGCAAAACCCACAGACTTCTCT | |
| | | | CTGCTTCAGCGAATCTATTCCGACGCC | |
| | | | TTCCAATCGCGAGGAAACTCAGCAAA | |
| | | | AGTCCAATCTGGAACTACTCCGCATTT | |
| | | | CTCTGCTTCTGATTCAGAGCTGGCTAG | |
| | | | AACCAGTGCAATTTCTGCGTTCCGTCT | |
| | | | TCGCCAATAGCCTAGTTTATGGCGCAT | |
| | | | CCGACAGCAACGTATACGATCTCCTG | |
| | | | AAAGATCTCGAGGAAGGCATTCAGAC | |
| | | | CCTGATGGGTCGTCTCGAGGATGGCT | |
| | | | CTCCGCGTACTGGTCAGATCTTCAAGC | |
| | | | AGACTTACTCTAAATTTGATACTAACA | |
| | | | GCCACAATGACGATGCGCTTCTAAAA | |
| | | | AACTATGGTCTGCTGTATTGTTTTCGT | |
| | | | AAAGATATGGACAAAGTTGAAACCTT | |
| | | | CCTGCGTATTGTTCAGTGTCGTTCCGT | |
| | | | TGAGGGCAGCTGTGGTTTCTAAGGTG | |
| | | | GTACCTCTGAAAGCGCAACTCCTGAG | |
| | | | TCTGGCCCAGGTAGCGAACCTGCTAC | |
| | | | CTCCGGCTCTGAGACTCCAGGTACCTC | |
| | | | TGAAAGCGCAACCCCGGAATCTGGTC | |
| | | | CAGGTAGCGAACCTGCAACCTCTGGC | |
| | | | TCTGAAACCCCAGGTACCTCTGAAAG | |
| | | | CGCTACTCCTGAATCTGGCCCAGGTA | |
| | | | CTTCTACTGAACCGTCCGAGGGCAGC | |
| | | | GCACCAGGTAGCCCTGCTGGCTCTCC | |
| | | | AACCTCCACCGAAGAAGGTACCTCTG | |
| | | | AAAGCGCAACCCCTGAATCCGGCCCA | |
| | | | GGTAGCGAACCGGCAACCTCCGGTTC | |
| | | | TGAAACCCCAGGTACTTCTGAAAGCG | |
| | | | CTACTCCTGAGTCCGGCCCAGGTAGC | |
| | | | CCGGCTGGCTCTCCGACTTCCACCGA | |
| | | | GGAAGGTAGCCCGGCTGGCTCTCCAA | |
| | | | CTTCTACTGAAGAAGGTACTTCTACCG | |
| | | | AACCTTCCGAGGGCAGCGCACCAGGT | |
| | | | ACTTCTGAAAGCGCTACCCCTGAGTC | |
| | | | CGGCCCAGGTACTTCTGAAAGCGCTA | |
| | | | CTCCTGAATCCGGTCCAGGTACTTCTG | |
| | | | AAAGCGCTACCCCGGAATCTGGCCCA | |
| | | | GGTAGCGAACCGGCTACTTCTGGTTCT | |
| | | | GAAACCCCAGGTAGCGAACCGGCTAC | |
| | | | CTCCGGTTCTGAAACTCCAGGTAGCC | |
| | | | CAGCAGGCTCTCCGACTTCCACTGAG | |
| | | | GAAGGTACTTCTACTGAACCTTCCGA | |
| | | | AGGCAGCGCACCAGGTACCTCTACTG | |
| | | | AACCTTCTGAGGGCAGCGCTCCAGGT | |
| | | | AGCGAACCTGCAACCTCTGGCTCTGA | |
| | | | AACCCCAGGTACCTCTGAAAGCGCTA | |
| | | | CTCCTGAATCTGGCCCAGGTACTTCTA | |
| | | | CTGAACCGTCCGAGGGCAGCGCACCA | |
| AF576- | GSTSSTAESPGPGSTS | 777 | GGTTCTACTAGCTCTACCGCTGAATCT | 778 |
| hGH- | STAESPGPGSTSESPS | | CCTGGCCCAGGTTCCACTAGCTCTACC | |
| AE288 | GTAPGSTSSTAESPG | | GCAGAATCTCCGGGCCCAGGTTCTAC | |
| | PGSTSSTAESPGPGTS | | TAGCGAATCCCCTTCTGGTACCGCTCC | |
| | TPESGSASPGSTSESP | | AGGTTCTACTAGCTCTACCGCTGAATC | |
| | SGTAPGTSPSGESST | | TCCGGGTCCAGGTTCTACCAGCTCTAC | |
| | APGSTSESPSGTAPG | | TGCAGAATCTCCTGGCCCAGGTACTTC | |
| | STSESPSGTAPGTSPS | | TACTCCGGAAAGCGGTTCCGCTTCTCC | |
| | GESSTAPGSTSESPSG | | AGGTTCTACCAGCGAATCTCCTTCTGG | |
| | TAPGSTSESPSGTAP | | CACCGCTCCAGGTACCTCTCCTAGCG | |
| | GTSPSGESSTAPGSTS | | GCGAATCTTCTACCGCTCCAGGTTCTA | |
| | ESPSGTAPGSTSESPS | | CTAGCGAATCTCCTTCTGGCACTGCAC | |
| | GTAPGSTSESPSGTA | | CAGGTTCTACCAGCGAATCTCCTTCTG | |
| | PGTSTPESGSASPGST | | GCACCGCTCCAGGTACCTCTCCTAGC | |
| | SESPSGTAPGTSTPES | | GGCGAATCTTCTACCGCTCCAGGTTCT | |
| | GSASPGSTSSTAESP | | ACTAGCGAATCTCCTTCTGGCACTGCA | |
| | GPGSTSSTAESPGPG | | CCAGGTTCTACCAGCGAATCTCCTTCT | |
| | TSTPESGSASPGTSTP | | GGCACCGCTCCAGGTACCTCTCCTAG | |
| | ESGSASPGSTSESPSG | | CGGCGAATCTTCTACCGCTCCAGGTTC | |
| | TAPGTSTPESGSASP | | TACTAGCGAATCTCCTTCTGGCACTGC | |
| | GTSTPESGSASPGSTS | | ACCAGGTTCTACTAGCGAATCTCCTTC | |
| | ESPSGTAPGSTSESPS | | TGGCACTGCACCAGGTTCTACCAGCG | |
| | GTAPGSTSESPSGTA | | AATCTCCGTCTGGCACTGCACCAGGT | |
| | PGSTSSTAESPGPGTS | | ACCTCTACCCCTGAAAGCGGTTCCGCT | |
| | TPESGSASPGTSTPES | | TCTCCAGGTTCTACTAGCGAATCTCCT | |
| | GSASPGSTSESPSGT | | TCTGGTACCGCTCCAGGTACTTCTACC | |
| | APGSTSESPSGTAPG | | CCTGAAAGCGGCTCCGCTTCTCCAGG | |
| | TSTPESGSASPGSTSE | | TTCCACTAGCTCTACCGCTGAATCTCC | |
| | SPSGTAPGSTSESPSG | | GGGTCCAGGTTCTACTAGCTCTACTGC | |
| | TAPGTSTPESGSASP | | AGAATCTCCTGGCCCAGGTACCTCTA | |
| | GTSPSGESSTAPGSTS | | CTCCGGAAAGCGGCTCTGCATCTCCA | |
| | STAESPGPGTSPSGES | | GGTACTTCTACCCCTGAAAGCGGTTCT | |
| | STAPGSTSSTAESPGP | | GCATCTCCAGGTTCTACTAGCGAATCC | |
| | GTSTPESGSASPGSTS | | CCGTCTGGTACCGCACCAGGTACTTCT | |
| | ESPSGTAPGSTSSTA | | ACCCCGGAAAGCGGCTCTGCTTCTCC | |
| | ESPGPGTSTPESGSAS | | AGGTACTTCTACCCCGGAAAGCGGCT | |
| | PGTSTPESGSASPGFP | | CCGCATCTCCAGGTTCTACTAGCGAAT | |
| | TIPLSRLFDNAMLRA | | CTCCTTCTGGTACCGCTCCAGGTTCTA | |
| | HRLHQLAFDTYQEF | | CCAGCGAATCCCCGTCTGGTACTGCTC | |
| | EEAYIPKEQKYSFLQ | | CAGGTTCTACCAGCGAATCTCCTTCTG | |
| | NPQTSLCFSESIPTPS | | GTACTGCACCAGGTTCTACTAGCTCTA | |
| | NREETQQKSNLELLR | | CTGCAGAATCTCCTGGCCCAGGTACC | |
| | ISLLLIQSWLEPVQFL | | TCTACTCCGGAAAGCGGCTCTGCATCT | |
| | RSVFANSLVYGASD | | CCAGGTACTTCTACCCCTGAAAGCGG | |
| | SNVYDLLKDLEEGIQ | | TTCTGCATCTCCAGGTTCTACTAGCGA | |
| | TLMGRLEDGSPRTG | | ATCTCCTTCTGGCACTGCACCAGGTTC | |
| | QIFKQTYSKFDTNSH | | TACCAGCGAATCTCCGTCTGGCACTG | |
| | NDDALLKNYGLLYC | | CACCAGGTACCTCTACCCCTGAAAGC | |
| | FRKDMDKVETFLRI | | GGTTCCGCTTCTCCAGGTTCTACTAGC | |
| | VQCRSVEGSCGFGG | | GAATCTCCTTCTGGCACTGCACCAGGT | |
| | TSESATPESGPGSEP | | TCTACCAGCGAATCTCCGTCTGGCACT | |
| | ATSGSETPGTSESAT | | GCACCAGGTACCTCTACCCCTGAAAG | |
| | PESGPGSEPATSGSE | | CGGTTCCGCTTCTCCAGGTACTTCTCC | |
| | TPGTSESATPESGPG | | GAGCGGTGAATCTTCTACCGCACCAG | |
| | TSTEPSEGSAPGSPA | | GTTCTACTAGCTCTACCGCTGAATCTC | |
| | GSPTSTEEGTSESATP | | CGGGCCCAGGTACTTCTCCGAGCGGT | |
| | ESGPGSEPATSGSET | | GAATCTTCTACTGCTCCAGGTTCCACT | |
| | PGTSESATPESGPGSP | | AGCTCTACTGCTGAATCTCCTGGCCCA | |
| | AGSPTSTEEGSPAGS | | GGTACTTCTACTCCGGAAAGCGGTTC | |
| | PTSTEEGTSTEPSEGS | | CGCTTCTCCAGGTTCTACTAGCGAATC | |
| | APGTSESATPESGPG | | TCCGTCTGGCACCGCACCAGGTTCTAC | |
| | TSESATPESGPGTSES | | TAGCTCTACTGCAGAATCTCCTGGCCC | |
| | ATPESGPGSEPATSG | | AGGTACCTCTACTCCGGAAAGCGGCT | |
| | SETPGSEPATSGSETP | | CTGCATCTCCAGGTACTTCTACCCCTG | |
| | GSPAGSPTSTEEGTS | | AAAGCGGTTCTGCATCTCCAGGTTTTC | |
| | TEPSEGSAPGTSTEPS | | CGACTATTCCGCTGTCTCGTCTGTTTG | |
| | EGSAPGSEPATSGSE | | ATAATGCTATGCTGCGTGCGCACCGT | |
| | TPGTSESATPESGPG | | CTGCACCAGCTGGCCTTTGATACTTAC | |
| | TSTEPSEGSAP | | CAGGAATTTGAAGAAGCcTACATTCCT | |
| | | | AAAGAGCAGAAGTACTCTTTCCTGCA | |
| | | | AAACCCACAGACTTCTCTCTGCTTCAG | |
| | | | CGAATCTATTCCGACGCCTTCCAATCG | |
| | | | CGAGGAAACTCAGCAAAAGTCCAATC | |
| | | | TGGAACTACTCCGCATTTCTCTGCTTC | |
| | | | TGATTCAGAGCTGGCTAGAACCAGTG | |
| | | | CAATTTCTGCGTTCCGTCTTCGCCAAT | |
| | | | AGCCTAGTTTATGGCGCATCCGACAG | |
| | | | CAACGTATACGATCTCCTGAAAGATC | |
| | | | TCGAGGAAGGCATTCAGACCCTGATG | |
| | | | GGTCGTCTCGAGGATGGCTCTCCGCG | |
| | | | TACTGGTCAGATCTTCAAGCAGACTT | |
| | | | ACTCTAAATTTGATACTAACAGCCAC | |
| | | | AATGACGATGCGCTTCTAAAAAACTA | |
| | | | TGGTCTGCTGTATTGTTTTCGTAAAGA | |
| | | | TATGGACAAAGTTGAAACCTTCCTGC | |
| | | | GTATTGTTCAGTGTCGTTCCGTTGAGG | |
| | | | GCAGCTGTGGTTTCTAAGGTGGTACCT | |
| | | | CTGAAAGCGCAACTCCTGAGTCTGGC | |
| | | | CCAGGTAGCGAACCTGCTACCTCCGG | |
| | | | CTCTGAGACTCCAGGTACCTCTGAAA | |
| | | | GCGCAACCCCGGAATCTGGTCCAGGT | |
| | | | AGCGAACCTGCAACCTCTGGCTCTGA | |
| | | | AACCCCAGGTACCTCTGAAAGCGCTA | |
| | | | CTCCTGAATCTGGCCCAGGTACTTCTA | |
| | | | CTGAACCGTCCGAGGGCAGCGCACCA | |
| | | | GGTAGCCCTGCTGGCTCTCCAACCTCC | |
| | | | ACCGAAGAAGGTACCTCTGAAAGCGC | |
| | | | AACCCCTGAATCCGGCCCAGGTAGCG | |
| | | | AACCGGCAACCTCCGGTTCTGAAACC | |
| | | | CCAGGTACTTCTGAAAGCGCTACTCCT | |
| | | | GAGTCCGGCCCAGGTAGCCCGGCTGG | |
| | | | CTCTCCGACTTCCACCGAGGAAGGTA | |
| | | | GCCCGGCTGGCTCTCCAACTTCTACTG | |
| | | | AAGAAGGTACTTCTACCGAACCTTCC | |
| | | | GAGGGCAGCGCACCAGGTACTTCTGA | |
| | | | AAGCGCTACCCCTGAGTCCGGCCCAG | |
| | | | GTACTTCTGAAAGCGCTACTCCTGAAT | |
| | | | CCGGTCCAGGTACTTCTGAAAGCGCT | |
| | | | ACCCCGGAATCTGGCCCAGGTAGCGA | |
| | | | ACCGGCTACTTCTGGTTCTGAAACCCC | |
| | | | AGGTAGCGAACCGGCTACCTCCGGTT | |
| | | | CTGAAACTCCAGGTAGCCCAGCAGGC | |
| | | | TCTCCGACTTCCACTGAGGAAGGTAC | |
| | | | TTCTACTGAACCTTCCGAAGGCAGCG | |
| | | | CACCAGGTACCTCTACTGAACCTTCTG | |
| | | | AGGGCAGCGCTCCAGGTAGCGAACCT | |
| | | | GCAACCTCTGGCTCTGAAACCCCAGG | |
| | | | TACCTCTGAAAGCGCTACTCCTGAATC | |
| | | | TGGCCCAGGTACTTCTACTGAACCGTC | |
| | | | CGAGGGCAGCGCACCA | |
| AE624- | MAEPAGSPTSTEEGT | 779 | ATGGCTGAACCTGCTGGCTCTCCAAC | 780 |
| hGH- | PGSGTASSSPGSSTPS | | CTCCACTGAGGAAGGTACCCCGGGTA | |
| AE288 | GATGSPGASPGTSST | | GCGGTACTGCTTCTTCCTCTCCAGGTA | |
| | GSPGSPAGSPTSTEE | | GCTCTACCCCTTCTGGTGCAACCGGCT | |
| | GTSESATPESGPGTS | | CTCCAGGTGCTTCTCCGGGCACCAGCT | |
| | TEPSEGSAPGSPAGS | | CTACCGGTTCTCCAGGTAGCCCGGCT | |
| | PTSTEEGTSTEPSEGS | | GGCTCTCCTACCTCTACTGAGGAAGG | |
| | APGTSTEPSEGSAPG | | TACTTCTGAAAGCGCTACTCCTGAGTC | |
| | TSESATPESGPGSEP | | TGGTCCAGGTACCTCTACTGAACCGTC | |
| | ATSGSETPGSEPATS | | CGAAGGTAGCGCTCCAGGTAGCCCAG | |
| | GSETPGSPAGSPTST | | CAGGCTCTCCGACTTCCACTGAGGAA | |
| | EEGTSESATPESGPG | | GGTACTTCTACTGAACCTTCCGAAGG | |
| | TSTEPSEGSAPGTSTE | | CAGCGCACCAGGTACCTCTACTGAAC | |
| | PSEGSAPGSPAGSPT | | CTTCTGAGGGCAGCGCTCCAGGTACT | |
| | STEEGTSTEPSEGSAP | | TCTGAAAGCGCTACCCCGGAATCTGG | |
| | GTSTEPSEGSAPGTS | | CCCAGGTAGCGAACCGGCTACTTCTG | |
| | ESATPESGPGTSTEPS | | GTTCTGAAACCCCAGGTAGCGAACCG | |
| | EGSAPGTSESATPES | | GCTACCTCCGGTTCTGAAACTCCAGGT | |
| | GPGSEPATSGSETPG | | AGCCCGGCAGGCTCTCCGACCTCTAC | |
| | TSTEPSEGSAPGTSTE | | TGAGGAAGGTACTTCTGAAAGCGCAA | |
| | PSEGSAPGTSESATP | | CCCCGGAGTCCGGCCCAGGTACCTCT | |
| | ESGPGTSESATPESG | | ACCGAACCGTCTGAGGGCAGCGCACC | |
| | PGSPAGSPTSTEEGT | | AGGTACTTCTACCGAACCGTCCGAGG | |
| | SESATPESGPGSEPA | | GTAGCGCACCAGGTAGCCCAGCAGGT | |
| | TSGSETPGTSESATPE | | TCTCCTACCTCCACCGAGGAAGGTAC | |
| | SGPGTSTEPSEGSAP | | TTCTACCGAACCGTCCGAGGGTAGCG | |
| | GTSTEPSEGSAPGTS | | CACCAGGTACCTCTACTGAACCTTCTG | |
| | TEPSEGSAPGTSTEPS | | AGGGCAGCGCTCCAGGTACTTCTGAA | |
| | EGSAPGTSTEPSEGS | | AGCGCTACCCCGGAGTCCGGTCCAGG | |
| | APGTSTEPSEGSAPG | | TACTTCTACTGAACCGTCCGAAGGTA | |
| | SPAGSPTSTEEGTSTE | | GCGCACCAGGTACTTCTGAAAGCGCA | |
| | PSEGSAPGTSESATP | | ACCCCTGAATCCGGTCCAGGTAGCGA | |
| | ESGPGSEPATSGSET | | ACCGGCTACTTCTGGCTCTGAGACTCC | |
| | PGTSESATPESGPGS | | AGGTACTTCTACCGAACCGTCCGAAG | |
| | EPATSGSETPGTSES | | GTAGCGCACCAGGTACTTCTACTGAA | |
| | ATPESGPGTSTEPSE | | CCGTCTGAAGGTAGCGCACCAGGTAC | |
| | GSAPGTSESATPESG | | TTCTGAAAGCGCAACCCCGGAATCCG | |
| | PGSPAGSPTSTEEGSP | | GCCCAGGTACCTCTGAAAGCGCAACC | |
| | AGSPTSTEEGSPAGS | | CCGGAGTCCGGCCCAGGTAGCCCTGC | |
| | PTSTEEGTSESATPES | | TGGCTCTCCAACCTCCACCGAAGAAG | |
| | GPGTSTEPSEGSAPG | | GTACCTCTGAAAGCGCAACCCCTGAA | |
| | FPTIPLSRLFDNAML | | TCCGGCCCAGGTAGCGAACCGGCAAC | |
| | RAHRLHQLAFDTYQ | | CTCCGGTTCTGAAACCCCAGGTACCTC | |
| | EFEEAYIPKEQKYSF | | TGAAAGCGCTACTCCGGAGTCTGGCC | |
| | LQNPQTSLCFSESIPT | | CAGGTACCTCTACTGAACCGTCTGAG | |
| | PSNREETQQKSNLEL | | GGTAGCGCTCCAGGTACTTCTACTGA | |
| | LRISLLLIQSWLEPVQ | | ACCGTCCGAAGGTAGCGCACCAGGTA | |
| | FLRSVFANSLVYGAS | | CTTCTACCGAACCGTCCGAAGGCAGC | |
| | DSNVYDLLKDLEEGI | | GCTCCAGGTACCTCTACTGAACCTTCC | |
| | QTLMGRLEDGSPRT | | GAGGGCAGCGCTCCAGGTACCTCTAC | |
| | GQIFKQTYSKFDTNS | | CGAACCTTCTGAAGGTAGCGCACCAG | |
| | HNDDALLKNYGLLY | | GTACTTCTACCGAACCGTCCGAGGGT | |
| | CFRKDMDKVETFLRI | | AGCGCACCAGGTAGCCCAGCAGGTTC | |
| | VQCRSVEGSCGFGG | | TCCTACCTCCACCGAGGAAGGTACTT | |
| | TSESATPESGPGSEP | | CTACCGAACCGTCCGAGGGTAGCGCA | |
| | ATSGSETPGTSESAT | | CCAGGTACCTCTGAAAGCGCAACTCC | |
| | PESGPGSEPATSGSE | | TGAGTCTGGCCCAGGTAGCGAACCTG | |
| | TPGTSESATPESGPG | | CTACCTCCGGCTCTGAGACTCCAGGT | |
| | TSTEPSEGSAPGSPA | | ACCTCTGAAAGCGCAACCCCGGAATC | |
| | GSPTSTEEGTSESATP | | TGGTCCAGGTAGCGAACCTGCAACCT | |
| | ESGPGSEPATSGSET | | CTGGCTCTGAAACCCCAGGTACCTCT | |
| | PGTSESATPESGPGSP | | GAAAGCGCTACTCCTGAATCTGGCCC | |
| | AGSPTSTEEGSPAGS | | AGGTACTTCTACTGAACCGTCCGAGG | |
| | PTSTEEGTSTEPSEGS | | GCAGCGCACCAGGTACTTCTGAAAGC | |
| | APGTSESATPESGPG | | GCTACTCCTGAGTCCGGCCCAGGTAG | |
| | TSESATPESGPGTSES | | CCCGGCTGGCTCTCCGACTTCCACCGA | |
| | ATPESGPGSEPATSG | | GGAAGGTAGCCCGGCTGGCTCTCCAA | |
| | SETPGSEPATSGSETP | | CTTCTACTGAAGAAGGTAGCCCGGCA | |
| | GSPAGSPTSTEEGTS | | GGCTCTCCGACCTCTACTGAGGAAGG | |
| | TEPSEGSAPGTSTEPS | | TACTTCTGAAAGCGCAACCCCGGAGT | |
| | EGSAPGSEPATSGSE | | CCGGCCCAGGTACCTCTACCGAACCG | |
| | TPGTSESATPESGPG | | TCTGAGGGCAGCGCACCAGGTTTTCC | |
| | TSTEPSEGSAP | | GACTATTCCGCTGTCTCGTCTGTTTGA | |
| | | | TAATGCTATGCTGCGTGCGCACCGTCT | |
| | | | GCACCAGCTGGCCTTTGATACTTACCA | |
| | | | GGAATTTGAAGAAGCcTACATTCCTAA | |
| | | | AGAGCAGAAGTACTCTTTCCTGCAAA | |
| | | | ACCCACAGACTTCTCTCTGCTTCAGCG | |
| | | | AATCTATTCCGACGCCTTCCAATCGCG | |
| | | | AGGAAACTCAGCAAAAGTCCAATCTG | |
| | | | GAACTACTCCGCATTTCTCTGCTTCTG | |
| | | | ATTCAGAGCTGGCTAGAACCAGTGCA | |
| | | | ATTTCTGCGTTCCGTCTTCGCCAATAG | |
| | | | CCTAGTTTATGGCGCATCCGACAGCA | |
| | | | ACGTATACGATCTCCTGAAAGATCTC | |
| | | | GAGGAAGGCATTCAGACCCTGATGGG | |
| | | | TCGTCTCGAGGATGGCTCTCCGCGTAC | |
| | | | TGGTCAGATCTTCAAGCAGACTTACTC | |
| | | | TAAATTTGATACTAACAGCCACAATG | |
| | | | ACGATGCGCTTCTAAAAAACTATGGT | |
| | | | CTGCTGTATTGTTTTCGTAAAGATATG | |
| | | | GACAAAGTTGAAACCTTCCTGCGTAT | |
| | | | TGTTCAGTGTCGTTCCGTTGAGGGCAG | |
| | | | CTGTGGTTTCTAAGGTGGTACCTCTGA | |
| | | | AAGCGCAACTCCTGAGTCTGGCCCAG | |
| | | | GTAGCGAACCTGCTACCTCCGGCTCT | |
| | | | GAGACTCCAGGTACCTCTGAAAGCGC | |
| | | | AACCCCGGAATCTGGTCCAGGTAGCG | |
| | | | AACCTGCAACCTCTGGCTCTGAAACC | |
| | | | CCAGGTACCTCTGAAAGCGCTACTCC | |
| | | | TGAATCTGGCCCAGGTACTTCTACTGA | |
| | | | ACCGTCCGAGGGCAGCGCACCAGGTA | |
| | | | GCCCTGCTGGCTCTCCAACCTCCACCG | |
| | | | AAGAAGGTACCTCTGAAAGCGCAACC | |
| | | | CCTGAATCCGGCCCAGGTAGCGAACC | |
| | | | GGCAACCTCCGGTTCTGAAACCCCAG | |
| | | | GTACTTCTGAAAGCGCTACTCCTGAGT | |
| | | | CCGGCCCAGGTAGCCCGGCTGGCTCT | |
| | | | CCGACTTCCACCGAGGAAGGTAGCCC | |
| | | | GGCTGGCTCTCCAACTTCTACTGAAG | |
| | | | AAGGTACTTCTACCGAACCTTCCGAG | |
| | | | GGCAGCGCACCAGGTACTTCTGAAAG | |
| | | | CGCTACCCCTGAGTCCGGCCCAGGTA | |
| | | | CTTCTGAAAGCGCTACTCCTGAATCCG | |
| | | | GTCCAGGTACTTCTGAAAGCGCTACC | |
| | | | CCGGAATCTGGCCCAGGTAGCGAACC | |
| | | | GGCTACTTCTGGTTCTGAAACCCCAG | |
| | | | GTAGCGAACCGGCTACCTCCGGTTCT | |
| | | | GAAACTCCAGGTAGCCCAGCAGGCTC | |
| | | | TCCGACTTCCACTGAGGAAGGTACTT | |
| | | | CTACTGAACCTTCCGAAGGCAGCGCA | |
| | | | CCAGGTACCTCTACTGAACCTTCTGAG | |
| | | | GGCAGCGCTCCAGGTAGCGAACCTGC | |
| | | | AACCTCTGGCTCTGAAACCCCAGGTA | |
| | | | CCTCTGAAAGCGCTACTCCTGAATCTG | |
| | | | GCCCAGGTACTTCTACTGAACCGTCC | |
| | | | GAGGGCAGCGCACCA | |
| AD836- | GSSESGSSEGGPGSS | 781 | GGTTCCTCTGAAAGCGGTTCTTCCGAA | 782 |
| hGH- | ESGSSEGGPGESPGG | | GGTGGTCCAGGTTCCTCTGAAAGCGG | |
| AE288 | SSGSESGSGGEPSES | | TTCTTCTGAGGGTGGTCCAGGTGAATC | |
| | GSSGESPGGSSGSES | | TCCGGGTGGCTCCAGCGGTTCCGAGT | |
| | GESPGGSSGSESGSS | | CAGGTTCTGGTGGCGAACCTTCCGAG | |
| | ESGSSEGGPGSSESG | | TCTGGTAGCTCAGGTGAATCTCCGGG | |
| | SSEGGPGSSESGSSE | | TGGTTCTAGCGGTTCCGAGTCAGGTG | |
| | GGPGESPGGSSGSES | | AATCTCCGGGTGGTTCCAGCGGTTCTG | |
| | GESPGGSSGSESGES | | AGTCAGGTTCCTCCGAAAGCGGTTCTT | |
| | PGGSSGSESGSSESG | | CTGAGGGCGGTCCAGGTTCCTCCGAA | |
| | SSEGGPGSSESGSSE | | AGCGGTTCTTCCGAGGGCGGTCCAGG | |
| | GGPGSSESGSSEGGP | | TTCTTCTGAAAGCGGTTCTTCCGAGGG | |
| | GSSESGSSEGGPGSS | | CGGTCCAGGTGAATCTCCTGGTGGTTC | |
| | ESGSSEGGPGSSESG | | CAGCGGTTCCGAGTCAGGTGAATCTC | |
| | SSEGGPGSGGEPSES | | CAGGTGGCTCTAGCGGTTCCGAGTCA | |
| | GSSGESPGGSSGSES | | GGTGAATCTCCTGGTGGTTCTAGCGGT | |
| | GESPGGSSGSESGSG | | TCTGAATCAGGTTCCTCCGAAAGCGG | |
| | GEPSESGSSGSEGSS | | TTCTTCTGAGGGCGGTCCAGGTTCCTC | |
| | GPGESSGSSESGSSE | | CGAAAGCGGTTCTTCCGAGGGCGGTC | |
| | GGPGSGGEPSESGSS | | CAGGTTCTTCTGAAAGCGGTTCTTCCG | |
| | GSEGSSGPGESSGSS | | AGGGCGGTCCAGGTTCCTCTGAAAGC | |
| | ESGSSEGGPGSGGEP | | GGTTCTTCTGAGGGCGGTCCAGGTTCT | |
| | SESGSSGESPGGSSG | | TCCGAAAGCGGTTCTTCCGAGGGCGG | |
| | SESGSGGEPSESGSS | | TCCAGGTTCTTCCGAAAGCGGTTCTTC | |
| | GSGGEPSESGSSGSS | | TGAAGGCGGTCCAGGTTCTGGTGGCG | |
| | ESGSSEGGPGSGGEP | | AACCGTCCGAGTCTGGTAGCTCAGGT | |
| | SESGSSGSGGEPSES | | GAATCTCCGGGTGGCTCTAGCGGTTC | |
| | GSSGSEGSSGPGESS | | CGAGTCAGGTGAATCTCCTGGTGGTT | |
| | GESPGGSSGSESGSE | | CCAGCGGTTCCGAGTCAGGTTCCGGT | |
| | GSSGPGESSGSEGSS | | GGCGAACCGTCCGAATCTGGTAGCTC | |
| | GPGESSGSGGEPSES | | AGGTAGCGAAGGTTCTTCTGGTCCAG | |
| | GSSGSSESGSSEGGP | | GCGAATCTTCAGGTTCCTCTGAAAGC | |
| | GSSESGSSEGGPGES | | GGTTCTTCTGAGGGCGGTCCAGGTTCC | |
| | PGGSSGSESGSGGEP | | GGTGGCGAACCGTCCGAATCTGGTAG | |
| | SESGSSGSEGSSGPG | | CTCAGGTAGCGAAGGTTCTTCTGGTCC | |
| | ESSGESPGGSSGSES | | AGGCGAATCTTCAGGTTCCTCTGAAA | |
| | GSEGSSGPGSSESGS | | GCGGTTCTTCTGAGGGCGGTCCAGGT | |
| | SEGGPGSGGEPSESG | | TCCGGTGGCGAACCTTCCGAATCTGG | |
| | SSGSEGSSGPGESSG | | TAGCTCAGGTGAATCTCCGGGTGGTT | |
| | SEGSSGPGESSGSEG | | CTAGCGGTTCTGAGTCAGGTTCTGGTG | |
| | SSGPGESSGSGGEPS | | GTGAACCTTCCGAGTCTGGTAGCTCA | |
| | ESGSSGSGGEPSESG | | GGTTCTGGTGGCGAACCATCCGAGTC | |
| | SSGESPGGSSGSESG | | TGGTAGCTCAGGTTCTTCCGAAAGCG | |
| | ESPGGSSGSESGSGG | | GTTCTTCCGAAGGCGGTCCAGGTTCTG | |
| | EPSESGSSGSEGSSGP | | GTGGTGAACCGTCCGAATCTGGTAGC | |
| | GESSGESPGGSSGSE | | TCAGGTTCTGGTGGCGAACCATCCGA | |
| | SGSSESGSSEGGPGS | | ATCTGGTAGCTCAGGTAGCGAAGGTT | |
| | SESGSSEGGPGSSES | | CTTCTGGTCCTGGCGAATCTTCAGGTG | |
| | GSSEGGPGSGGEPSE | | AATCTCCAGGTGGCTCTAGCGGTTCC | |
| | SGSSGSSESGSSEGG | | GAATCAGGTAGCGAAGGTTCTTCCGG | |
| | PGESPGGSSGSESGS | | TCCAGGTGAATCTTCAGGTAGCGAAG | |
| | GGEPSESGSSGSSES | | GTTCTTCTGGTCCTGGTGAATCCTCAG | |
| | GSSEGGPGESPGGSS | | GTTCCGGTGGCGAACCATCTGAATCT | |
| | GSESGSGGEPSESGS | | GGTAGCTCAGGTTCCTCTGAAAGCGG | |
| | SGESPGGSSGSESGS | | TTCTTCCGAAGGTGGTCCAGGTTCCTC | |
| | GGEPSESGSSGFPTIP | | TGAAAGCGGTTCTTCTGAGGGTGGTC | |
| | LSRLFDNAMLRAHR | | CAGGTGAATCTCCGGGTGGCTCCAGC | |
| | LHQLAFDTYQEFEE | | GGTTCCGAGTCAGGTTCTGGTGGCGA | |
| | AYIPKEQKYSFLQNP | | ACCATCCGAATCTGGTAGCTCAGGTA | |
| | QTSLCFSESIPTPSNR | | GCGAAGGTTCTTCTGGTCCTGGCGAA | |
| | EETQQKSNLELLRIS | | TCTTCAGGTGAATCTCCAGGTGGCTCT | |
| | LLLIQSWLEPVQFLR | | AGCGGTTCCGAATCAGGTAGCGAAGG | |
| | SVFANSLVYGASDS | | TTCTTCCGGTCCaGGTTCCTCTGAAAG | |
| | NVYDLLKDLEEGIQT | | CGGTTCTTCTGAGGGCGGTCCAGGTTC | |
| | LMGRLEDGSPRTGQI | | TGGTGGCGAACCATCTGAATCTGGTA | |
| | FKQTYSKFDTNSHN | | GCTCAGGTAGCGAAGGTTCTTCCGGT | |
| | DDALLKNYGLLYCF | | CCGGGTGAATCTTCAGGTAGCGAAGG | |
| | RKDMDKVETFLRIV | | TTCTTCCGGTCCAGGTGAATCTTCAGG | |
| | QCRSVEGSCGFGGTS | | TAGCGAAGGTTCTTCTGGTCCTGGTGA | |
| | ESATPESGPGSEPAT | | ATCCTCAGGTTCCGGTGGCGAACCAT | |
| | SGSETPGTSESATPES | | CTGAATCTGGTAGCTCAGGTTCTGGTG | |
| | GPGSEPATSGSETPG | | GCGAACCATCCGAATCTGGTAGCTCA | |
| | TSESATPESGPGTSTE | | GGTGAATCTCCGGGTGGCTCCAGCGG | |
| | PSEGSAPGSPAGSPT | | TTCTGAATCAGGTGAATCTCCTGGTGG | |
| | STEEGTSESATPESGP | | CTCCAGCGGTTCTGAGTCAGGTTCTGG | |
| | GSEPATSGSETPGTS | | TGGCGAACCATCCGAATCTGGTAGCT | |
| | ESATPESGPGSPAGS | | CAGGTAGCGAAGGTTCTTCTGGTCCT | |
| | PTSTEEGSPAGSPTST | | GGCGAATCTTCAGGTGAATCTCCAGG | |
| | EEGTSTEPSEGSAPG | | TGGCTCTAGCGGTTCCGAATCAGGTTC | |
| | TSESATPESGPGTSES | | CTCTGAAAGCGGTTCTTCTGAGGGCG | |
| | ATPESGPGTSESATP | | GTCCAGGTTCTTCCGAAAGCGGTTCTT | |
| | ESGPGSEPATSGSET | | CCGAGGGCGGTCCAGGTTCTTCCGAA | |
| | PGSEPATSGSETPGSP | | AGCGGTTCTTCTGAAGGCGGTCCAGG | |
| | AGSPTSTEEGTSTEPS | | TTCTGGTGGCGAACCGTCCGAATCTG | |
| | EGSAPGTSTEPSEGS | | GTAGCTCAGGTTCCTCCGAAAGCGGT | |
| | APGSEPATSGSETPG | | TCTTCTGAAGGTGGTCCAGGTGAATCT | |
| | TSESATPESGPGTSTE | | CCAGGTGGTTCTAGCGGTTCTGAATC | |
| | PSEGSAP | | AGGTTCTGGTGGCGAACCGTCCGAAT | |
| | | | CTGGTAGCTCAGGTTCCTCCGAAAGC | |
| | | | GGTTCTTCTGAAGGTGGTCCAGGTGA | |
| | | | ATCTCCAGGTGGTTCTAGCGGTTCTGA | |
| | | | ATCAGGTTCTGGTGGCGAACCGTCCG | |
| | | | AATCTGGTAGCTCAGGTGAATCTCCT | |
| | | | GGTGGTTCCAGCGGTTCCGAGTCAGG | |
| | | | TTCTGGTGGCGAACCTTCCGAATCTGG | |
| | | | TAGCTCAGGTTTTCCGACTATTCCGCT | |
| | | | GTCTCGTCTGTTTGATAATGCTATGCT | |
| | | | GCGTGCGCACCGTCTGCACCAGCTGG | |
| | | | CCTTTGATACTTACCAGGAATTTGAAG | |
| | | | AAGCcTACATTCCTAAAGAGCAGAAG | |
| | | | TACTCTTTCCTGCAAAACCCACAGACT | |
| | | | TCTCTCTGCTTCAGCGAATCTATTCCG | |
| | | | ACGCCTTCCAATCGCGAGGAAACTCA | |
| | | | GCAAAAGTCCAATCTGGAACTACTCC | |
| | | | GCATTTCTCTGCTTCTGATTCAGAGCT | |
| | | | GGCTAGAACCAGTGCAATTTCTGCGT | |
| | | | TCCGTCTTCGCCAATAGCCTAGTTTAT | |
| | | | GGCGCATCCGACAGCAACGTATACGA | |
| | | | TCTCCTGAAAGATCTCGAGGAAGGCA | |
| | | | TTCAGACCCTGATGGGTCGTCTCGAG | |
| | | | GATGGCTCTCCGCGTACTGGTCAGAT | |
| | | | CTTCAAGCAGACTTACTCTAAATTTGA | |
| | | | TACTAACAGCCACAATGACGATGCGC | |
| | | | TTCTAAAAAACTATGGTCTGCTGTATT | |
| | | | GTTTTCGTAAAGATATGGACAAAGTT | |
| | | | GAAACCTTCCTGCGTATTGTTCAGTGT | |
| | | | CGTTCCGTTGAGGGCAGCTGTGGTTTC | |
| | | | TAAGGTGGTACCTCTGAAAGCGCAAC | |
| | | | TCCTGAGTCTGGCCCAGGTAGCGAAC | |
| | | | CTGCTACCTCCGGCTCTGAGACTCCAG | |
| | | | GTACCTCTGAAAGCGCAACCCCGGAA | |
| | | | TCTGGTCCAGGTAGCGAACCTGCAAC | |
| | | | CTCTGGCTCTGAAACCCCAGGTACCTC | |
| | | | TGAAAGCGCTACTCCTGAATCTGGCC | |
| | | | CAGGTACTTCTACTGAACCGTCCGAG | |
| | | | GGCAGCGCACCAGGTAGCCCTGCTGG | |
| | | | CTCTCCAACCTCCACCGAAGAAGGTA | |
| | | | CCTCTGAAAGCGCAACCCCTGAATCC | |
| | | | GGCCCAGGTAGCGAACCGGCAACCTC | |
| | | | CGGTTCTGAAACCCCAGGTACTTCTG | |
| | | | AAAGCGCTACTCCTGAGTCCGGCCCA | |
| | | | GGTAGCCCGGCTGGCTCTCCGACTTCC | |
| | | | ACCGAGGAAGGTAGCCCGGCTGGCTC | |
| | | | TCCAACTTCTACTGAAGAAGGTACTTC | |
| | | | TACCGAACCTTCCGAGGGCAGCGCAC | |
| | | | CAGGTACTTCTGAAAGCGCTACCCCT | |
| | | | GAGTCCGGCCCAGGTACTTCTGAAAG | |
| | | | CGCTACTCCTGAATCCGGTCCAGGTA | |
| | | | CTTCTGAAAGCGCTACCCCGGAATCT | |
| | | | GGCCCAGGTAGCGAACCGGCTACTTC | |
| | | | TGGTTCTGAAACCCCAGGTAGCGAAC | |
| | | | CGGCTACCTCCGGTTCTGAAACTCCA | |
| | | | GGTAGCCCAGCAGGCTCTCCGACTTC | |
| | | | CACTGAGGAAGGTACTTCTACTGAAC | |
| | | | CTTCCGAAGGCAGCGCACCAGGTACC | |
| | | | TCTACTGAACCTTCTGAGGGCAGCGC | |
| | | | TCCAGGTAGCGAACCTGCAACCTCTG | |
| | | | GCTCTGAAACCCCAGGTACCTCTGAA | |
| | | | AGCGCTACTCCTGAATCTGGCCCAGG | |
| | | | TACTTCTACTGAACCGTCCGAGGGCA | |
| | | | GCGCACCA | |
| AE864- | GSPAGSPTSTEEGTS | 783 | GGTAGCCCGGCTGGCTCTCCTACCTCT | 784 |
| hGH- | ESATPESGPGTSTEPS | | ACTGAGGAAGGTACTTCTGAAAGCGC | |
| AE288 | EGSAPGSPAGSPTST | | TACTCCTGAGTCTGGTCCAGGTACCTC | |
| | EEGTSTEPSEGSAPG | | TACTGAACCGTCCGAAGGTAGCGCTC | |
| | TSTEPSEGSAPGTSES | | CAGGTAGCCCAGCAGGCTCTCCGACT | |
| | ATPESGPGSEPATSG | | TCCACTGAGGAAGGTACTTCTACTGA | |
| | SETPGSEPATSGSETP | | ACCTTCCGAAGGCAGCGCACCAGGTA | |
| | GSPAGSPTSTEEGTS | | CCTCTACTGAACCTTCTGAGGGCAGC | |
| | ESATPESGPGTSTEPS | | GCTCCAGGTACTTCTGAAAGCGCTAC | |
| | EGSAPGTSTEPSEGS | | CCCGGAATCTGGCCCAGGTAGCGAAC | |
| | APGSPAGSPTSTEEG | | CGGCTACTTCTGGTTCTGAAACCCCAG | |
| | TSTEPSEGSAPGTSTE | | GTAGCGAACCGGCTACCTCCGGTTCT | |
| | PSEGSAPGTSESATP | | GAAACTCCAGGTAGCCCGGCAGGCTC | |
| | ESGPGTSTEPSEGSA | | TCCGACCTCTACTGAGGAAGGTACTT | |
| | PGTSESATPESGPGS | | CTGAAAGCGCAACCCCGGAGTCCGGC | |
| | EPATSGSETPGTSTEP | | CCAGGTACCTCTACCGAACCGTCTGA | |
| | SEGSAPGTSTEPSEG | | GGGCAGCGCACCAGGTACTTCTACCG | |
| | SAPGTSESATPESGP | | AACCGTCCGAGGGTAGCGCACCAGGT | |
| | GTSESATPESGPGSP | | AGCCCAGCAGGTTCTCCTACCTCCACC | |
| | AGSPTSTEEGTSESA | | GAGGAAGGTACTTCTACCGAACCGTC | |
| | TPESGPGSEPATSGS | | CGAGGGTAGCGCACCAGGTACCTCTA | |
| | ETPGTSESATPESGP | | CTGAACCTTCTGAGGGCAGCGCTCCA | |
| | GTSTEPSEGSAPGTS | | GGTACTTCTGAAAGCGCTACCCCGGA | |
| | TEPSEGSAPGTSTEPS | | GTCCGGTCCAGGTACTTCTACTGAACC | |
| | EGSAPGTSTEPSEGS | | GTCCGAAGGTAGCGCACCAGGTACTT | |
| | APGTSTEPSEGSAPG | | CTGAAAGCGCAACCCCTGAATCCGGT | |
| | TSTEPSEGSAPGSPA | | CCAGGTAGCGAACCGGCTACTTCTGG | |
| | GSPTSTEEGTSTEPSE | | CTCTGAGACTCCAGGTACTTCTACCGA | |
| | GSAPGTSESATPESG | | ACCGTCCGAAGGTAGCGCACCAGGTA | |
| | PGSEPATSGSETPGT | | CTTCTACTGAACCGTCTGAAGGTAGC | |
| | SESATPESGPGSEPA | | GCACCAGGTACTTCTGAAAGCGCAAC | |
| | TSGSETPGTSESATPE | | CCCGGAATCCGGCCCAGGTACCTCTG | |
| | SGPGTSTEPSEGSAP | | AAAGCGCAACCCCGGAGTCCGGCCCA | |
| | GTSESATPESGPGSP | | GGTAGCCCTGCTGGCTCTCCAACCTCC | |
| | AGSPTSTEEGSPAGS | | ACCGAAGAAGGTACCTCTGAAAGCGC | |
| | PTSTEEGSPAGSPTST | | AACCCCTGAATCCGGCCCAGGTAGCG | |
| | EEGTSESATPESGPG | | AACCGGCAACCTCCGGTTCTGAAACC | |
| | TSTEPSEGSAPGTSES | | CCAGGTACCTCTGAAAGCGCTACTCC | |
| | ATPESGPGSEPATSG | | GGAGTCTGGCCCAGGTACCTCTACTG | |
| | SETPGTSESATPESGP | | AACCGTCTGAGGGTAGCGCTCCAGGT | |
| | GSEPATSGSETPGTS | | ACTTCTACTGAACCGTCCGAAGGTAG | |
| | ESATPESGPGTSTEPS | | CGCACCAGGTACTTCTACCGAACCGT | |
| | EGSAPGSPAGSPTST | | CCGAAGGCAGCGCTCCAGGTACCTCT | |
| | EEGTSESATPESGPG | | ACTGAACCTTCCGAGGGCAGCGCTCC | |
| | SEPATSGSETPGTSES | | AGGTACCTCTACCGAACCTTCTGAAG | |
| | ATPESGPGSPAGSPT | | GTAGCGCACCAGGTACTTCTACCGAA | |
| | STEEGSPAGSPTSTEE | | CCGTCCGAGGGTAGCGCACCAGGTAG | |
| | GTSTEPSEGSAPGTS | | CCCAGCAGGTTCTCCTACCTCCACCGA | |
| | ESATPESGPGTSESA | | GGAAGGTACTTCTACCGAACCGTCCG | |
| | TPESGPGTSESATPES | | AGGGTAGCGCACCAGGTACCTCTGAA | |
| | GPGSEPATSGSETPG | | AGCGCAACTCCTGAGTCTGGCCCAGG | |
| | SEPATSGSETPGSPA | | TAGCGAACCTGCTACCTCCGGCTCTG | |
| | GSPTSTEEGTSTEPSE | | AGACTCCAGGTACCTCTGAAAGCGCA | |
| | GSAPGTSTEPSEGSA | | ACCCCGGAATCTGGTCCAGGTAGCGA | |
| | PGSEPATSGSETPGT | | ACCTGCAACCTCTGGCTCTGAAACCC | |
| | SESATPESGPGTSTEP | | CAGGTACCTCTGAAAGCGCTACTCCT | |
| | SEGSAPGFPTIPLSRL | | GAATCTGGCCCAGGTACTTCTACTGA | |
| | FDNAMLRAHRLHQL | | ACCGTCCGAGGGCAGCGCACCAGGTA | |
| | AFDTYQEFEEAYIPK | | CTTCTGAAAGCGCTACTCCTGAGTCCG | |
| | EQKYSFLQNPQTSLC | | GCCCAGGTAGCCCGGCTGGCTCTCCG | |
| | FSESIPTPSNREETQQ | | ACTTCCACCGAGGAAGGTAGCCCGGC | |
| | KSNLELLRISLLLIQS | | TGGCTCTCCAACTTCTACTGAAGAAG | |
| | WLEPVQFLRSVFAN | | GTAGCCCGGCAGGCTCTCCGACCTCT | |
| | SLVYGASDSNVYDL | | ACTGAGGAAGGTACTTCTGAAAGCGC | |
| | LKDLEEGIQTLMGRL | | AACCCCGGAGTCCGGCCCAGGTACCT | |
| | EDGSPRTGQIFKQTY | | CTACCGAACCGTCTGAGGGCAGCGCA | |
| | SKFDTNSHNDDALL | | CCAGGTACCTCTGAAAGCGCAACTCC | |
| | KNYGLLYCFRKDMD | | TGAGTCTGGCCCAGGTAGCGAACCTG | |
| | KVETFLRIVQCRSVE | | CTACCTCCGGCTCTGAGACTCCAGGT | |
| | GSCGFGGTSESATPE | | ACCTCTGAAAGCGCAACCCCGGAATC | |
| | SGPGSEPATSGSETP | | TGGTCCAGGTAGCGAACCTGCAACCT | |
| | GTSESATPESGPGSE | | CTGGCTCTGAAACCCCAGGTACCTCT | |
| | PATSGSETPGTSESA | | GAAAGCGCTACTCCTGAATCTGGCCC | |
| | TPESGPGTSTEPSEGS | | AGGTACTTCTACTGAACCGTCCGAGG | |
| | APGSPAGSPTSTEEG | | GCAGCGCACCAGGTAGCCCTGCTGGC | |
| | TSESATPESGPGSEP | | TCTCCAACCTCCACCGAAGAAGGTAC | |
| | ATSGSETPGTSESAT | | CTCTGAAAGCGCAACCCCTGAATCCG | |
| | PESGPGSPAGSPTSTE | | GCCCAGGTAGCGAACCGGCAACCTCC | |
| | EGSPAGSPTSTEEGT | | GGTTCTGAAACCCCAGGTACTTCTGA | |
| | STEPSEGSAPGTSES | | AAGCGCTACTCCTGAGTCCGGCCCAG | |
| | ATPESGPGTSESATP | | GTAGCCCGGCTGGCTCTCCGACTTCCA | |
| | ESGPGTSESATPESG | | CCGAGGAAGGTAGCCCGGCTGGCTCT | |
| | PGSEPATSGSETPGS | | CCAACTTCTACTGAAGAAGGTACTTCT | |
| | EPATSGSETPGSPAG | | ACCGAACCTTCCGAGGGCAGCGCACC | |
| | SPTSTEEGTSTEPSEG | | AGGTACTTCTGAAAGCGCTACCCCTG | |
| | SAPGTSTEPSEGSAP | | AGTCCGGCCCAGGTACTTCTGAAAGC | |
| | GSEPATSGSETPGTS | | GCTACTCCTGAATCCGGTCCAGGTACT | |
| | ESATPESGPGTSTEPS | | TCTGAAAGCGCTACCCCGGAATCTGG | |
| | EGSAP | | CCCAGGTAGCGAACCGGCTACTTCTG | |
| | | | GTTCTGAAACCCCAGGTAGCGAACCG | |
| | | | GCTACCTCCGGTTCTGAAACTCCAGGT | |
| | | | AGCCCAGCAGGCTCTCCGACTTCCAC | |
| | | | TGAGGAAGGTACTTCTACTGAACCTT | |
| | | | CCGAAGGCAGCGCACCAGGTACCTCT | |
| | | | ACTGAACCTTCTGAGGGCAGCGCTCC | |
| | | | AGGTAGCGAACCTGCAACCTCTGGCT | |
| | | | CTGAAACCCCAGGTACCTCTGAAAGC | |
| | | | GCTACTCCTGAATCTGGCCCAGGTACT | |
| | | | TCTACTGAACCGTCCGAGGGCAGCGC | |
| | | | ACCAGGTTTTCCGACTATTCCGCTGTC | |
| | | | TCGTCTGTTTGATAATGCTATGCTGCG | |
| | | | TGCGCACCGTCTGCACCAGCTGGCCTT | |
| | | | TGATACTTACCAGGAATTTGAAGAAG | |
| | | | CcTACATTCCTAAAGAGCAGAAGTACT | |
| | | | CTTTCCTGCAAAACCCACAGACTTCTC | |
| | | | TCTGCTTCAGCGAATCTATTCCGACGC | |
| | | | CTTCCAATCGCGAGGAAACTCAGCAA | |
| | | | AAGTCCAATCTGGAACTACTCCGCAT | |
| | | | TTCTCTGCTTCTGATTCAGAGCTGGCT | |
| | | | AGAACCAGTGCAATTTCTGCGTTCCGT | |
| | | | CTTCGCCAATAGCCTAGTTTATGGCGC | |
| | | | ATCCGACAGCAACGTATACGATCTCC | |
| | | | TGAAAGATCTCGAGGAAGGCATTCAG | |
| | | | ACCCTGATGGGTCGTCTCGAGGATGG | |
| | | | CTCTCCGCGTACTGGTCAGATCTTCAA | |
| | | | GCAGACTTACTCTAAATTTGATACTAA | |
| | | | CAGCCACAATGACGATGCGCTTCTAA | |
| | | | AAAACTATGGTCTGCTGTATTGTTTTC | |
| | | | GTAAAGATATGGACAAAGTTGAAACC | |
| | | | TTCCTGCGTATTGTTCAGTGTCGTTCC | |
| | | | GTTGAGGGCAGCTGTGGTTTCTAAGG | |
| | | | TGGTACCTCTGAAAGCGCAACTCCTG | |
| | | | AGTCTGGCCCAGGTAGCGAACCTGCT | |
| | | | ACCTCCGGCTCTGAGACTCCAGGTAC | |
| | | | CTCTGAAAGCGCAACCCCGGAATCTG | |
| | | | GTCCAGGTAGCGAACCTGCAACCTCT | |
| | | | GGCTCTGAAACCCCAGGTACCTCTGA | |
| | | | AAGCGCTACTCCTGAATCTGGCCCAG | |
| | | | GTACTTCTACTGAACCGTCCGAGGGC | |
| | | | AGCGCACCAGGTAGCCCTGCTGGCTC | |
| | | | TCCAACCTCCACCGAAGAAGGTACCT | |
| | | | CTGAAAGCGCAACCCCTGAATCCGGC | |
| | | | CCAGGTAGCGAACCGGCAACCTCCGG | |
| | | | TTCTGAAACCCCAGGTACTTCTGAAA | |
| | | | GCGCTACTCCTGAGTCCGGCCCAGGT | |
| | | | AGCCCGGCTGGCTCTCCGACTTCCACC | |
| | | | GAGGAAGGTAGCCCGGCTGGCTCTCC | |
| | | | AACTTCTACTGAAGAAGGTACTTCTA | |
| | | | CCGAACCTTCCGAGGGCAGCGCACCA | |
| | | | GGTACTTCTGAAAGCGCTACCCCTGA | |
| | | | GTCCGGCCCAGGTACTTCTGAAAGCG | |
| | | | CTACTCCTGAATCCGGTCCAGGTACTT | |
| | | | CTGAAAGCGCTACCCCGGAATCTGGC | |
| | | | CCAGGTAGCGAACCGGCTACTTCTGG | |
| | | | TTCTGAAACCCCAGGTAGCGAACCGG | |
| | | | CTACCTCCGGTTCTGAAACTCCAGGTA | |
| | | | GCCCAGCAGGCTCTCCGACTTCCACT | |
| | | | GAGGAAGGTACTTCTACTGAACCTTC | |
| | | | CGAAGGCAGCGCACCAGGTACCTCTA | |
| | | | CTGAACCTTCTGAGGGCAGCGCTCCA | |
| | | | GGTAGCGAACCTGCAACCTCTGGCTC | |
| | | | TGAAACCCCAGGTACCTCTGAAAGCG | |
| | | | CTACTCCTGAATCTGGCCCAGGTACTT | |
| | | | CTACTGAACCGTCCGAGGGCAGCGCA | |
| | | | CCA | |
| AF864- | GSTSESPSGTAPGTSP | 785 | GGTTCTACCAGCGAATCTCCTTCTGGC | 786 |
| hGH- | SGESSTAPGSTSESPS | | ACCGCTCCAGGTACCTCTCCTAGCGG | |
| AE288 | GTAPGSTSESPSGTA | | CGAATCTTCTACCGCTCCAGGTTCTAC | |
| | PGTSTPESGSASPGTS | | TAGCGAATCTCCTTCTGGCACTGCACC | |
| | TPESGSASPGSTSESP | | AGGTTCTACTAGCGAATCCCCGTCTG | |
| | SGTAPGSTSESPSGT | | GTACTGCTCCAGGTACTTCTACTCCTG | |
| | APGTSPSGESSTAPG | | AAAGCGGTTCCGCTTCTCCAGGTACCT | |
| | STSESPSGTAPGTSPS | | CTACTCCGGAAAGCGGTTCTGCATCTC | |
| | GESSTAPGTSPSGESS | | CAGGTTCTACCAGCGAATCTCCTTCTG | |
| | TAPGSTSSTAESPGP | | GCACCGCTCCAGGTTCTACTAGCGAA | |
| | GTSPSGESSTAPGTSP | | TCCCCGTCTGGTACCGCACCAGGTACT | |
| | SGESSTAPGSTSSTA | | TCTCCTAGCGGCGAATCTTCTACCGCA | |
| | ESPGPGTSTPESGSAS | | CCAGGTTCTACTAGCGAATCTCCGTCT | |
| | PGTSTPESGSASPGST | | GGCACTGCTCCAGGTACTTCTCCTAGC | |
| | SESPSGTAPGSTSESP | | GGTGAATCTTCTACCGCTCCAGGTACT | |
| | SGTAPGTSTPESGSA | | TCCCCTAGCGGCGAATCTTCTACCGCT | |
| | SPGSTSSTAESPGPGT | | CCAGGTTCTACTAGCTCTACTGCAGA | |
| | STPESGSASPGSTSES | | ATCTCCGGGCCCAGGTACCTCTCCTAG | |
| | PSGTAPGTSPSGESST | | CGGTGAATCTTCTACCGCTCCAGGTAC | |
| | APGSTSSTAESPGPG | | TTCTCCGAGCGGTGAATCTTCTACCGC | |
| | TSPSGESSTAPGTSTP | | TCCAGGTTCTACTAGCTCTACTGCAGA | |
| | ESGSASPGSTSSTAES | | ATCTCCTGGCCCAGGTACCTCTACTCC | |
| | PGPGSTSSTAESPGP | | GGAAAGCGGCTCTGCATCTCCAGGTA | |
| | GSTSSTAESPGPGSTS | | CTTCTACCCCTGAAAGCGGTTCTGCAT | |
| | STAESPGPGTSPSGES | | CTCCAGGTTCTACTAGCGAATCTCCTT | |
| | STAPGSTSESPSGTAP | | CTGGCACTGCACCAGGTTCTACCAGC | |
| | GSTSESPSGTAPGTS | | GAATCTCCGTCTGGCACTGCACCAGG | |
| | TPESGPXXXGASASG | | TACCTCTACCCCTGAAAGCGGTTCCGC | |
| | APSTXXXXSESPSGT | | TTCTCCAGGTTCTACCAGCTCTACCGC | |
| | APGSTSESPSGTAPG | | AGAATCTCCTGGTCCAGGTACCTCTAC | |
| | STSESPSGTAPGSTSE | | TCCGGAAAGCGGCTCTGCATCTCCAG | |
| | SPSGTAPGSTSESPSG | | GTTCTACTAGCGAATCTCCTTCTGGCA | |
| | TAPGSTSESPSGTAP | | CTGCACCAGGTACTTCTCCGAGCGGT | |
| | GTSTPESGSASPGTSP | | GAATCTTCTACCGCACCAGGTTCTACT | |
| | SGESSTAPGTSPSGES | | AGCTCTACCGCTGAATCTCCGGGCCC | |
| | STAPGSTSSTAESPGP | | AGGTACTTCTCCGAGCGGTGAATCTTC | |
| | GTSPSGESSTAPGTS | | TACTGCTCCAGGTACCTCTACTCCTGA | |
| | TPESGSASPGSTSESP | | AAGCGGTTCTGCATCTCCAGGTTCCAC | |
| | SGTAPGSTSESPSGT | | TAGCTCTACCGCAGAATCTCCGGGCC | |
| | APGTSPSGESSTAPG | | CAGGTTCTACTAGCTCTACTGCTGAAT | |
| | STSESPSGTAPGTSTP | | CTCCTGGCCCAGGTTCTACTAGCTCTA | |
| | ESGSASPGTSTPESGS | | CTGCTGAATCTCCGGGTCCAGGTTCTA | |
| | ASPGSTSESPSGTAP | | CCAGCTCTACTGCTGAATCTCCTGGTC | |
| | GTSTPESGSASPGSTS | | CAGGTACCTCCCCGAGCGGTGAATCT | |
| | STAESPGPGSTSESPS | | TCTACTGCACCAGGTTCTACTAGCGA | |
| | GTAPGSTSESPSGTA | | ATCTCCTTCTGGCACTGCACCAGGTTC | |
| | PGTSPSGESSTAPGST | | TACCAGCGAATCTCCGTCTGGCACTG | |
| | SSTAESPGPGTSPSGE | | CACCAGGTACCTCTACCCCTGAAAGC | |
| | SSTAPGTSTPESGSAS | | GGTCCXXXXXXXXXXXXTGCAAGCG | |
| | PGTSPSGESSTAPGTS | | CAAGCGGCGCGCCAAGCACGGGAXX | |
| | PSGESSTAPGTSPSGE | | XXXXXXTAGCGAATCTCCTTCTGGTA | |
| | SSTAPGSTSSTAESPG | | CCGCTCCAGGTTCTACCAGCGAATCC | |
| | PGSTSSTAESPGPGTS | | CCGTCTGGTACTGCTCCAGGTTCTACC | |
| | PSGESSTAPGSSPSAS | | AGCGAATCTCCTTCTGGTACTGCACCA | |
| | TGTGPGSSTPSGATG | | GGTTCTACTAGCGAATCTCCTTCTGGT | |
| | SPGSSTPSGATGSPG | | ACCGCTCCAGGTTCTACCAGCGAATC | |
| | FPTIPLSRLFDNAML | | CCCGTCTGGTACTGCTCCAGGTTCTAC | |
| | RAHRLHQLAFDTYQ | | CAGCGAATCTCCTTCTGGTACTGCACC | |
| | EFEEAYIPKEQKYSF | | AGGTACTTCTACTCCGGAAAGCGGTT | |
| | LQNPQTSLCFSESIPT | | CCGCATCTCCAGGTACTTCTCCTAGCG | |
| | PSNREETQQKSNLEL | | GTGAATCTTCTACTGCTCCAGGTACCT | |
| | LRISLLLIQSWLEPVQ | | CTCCTAGCGGCGAATCTTCTACTGCTC | |
| | FLRSVFANSLVYGAS | | CAGGTTCTACCAGCTCTACTGCTGAAT | |
| | DSNVYDLLKDLEEGI | | CTCCGGGTCCAGGTACTTCCCCGAGC | |
| | QTLMGRLEDGSPRT | | GGTGAATCTTCTACTGCACCAGGTACT | |
| | GQIFKQTYSKFDTNS | | TCTACTCCGGAAAGCGGTTCCGCTTCT | |
| | HNDDALLKNYGLLY | | CCAGGTTCTACCAGCGAATCTCCTTCT | |
| | CFRKDMDKVETFLRI | | GGCACCGCTCCAGGTTCTACTAGCGA | |
| | VQCRSVEGSCGFGG | | ATCCCCGTCTGGTACCGCACCAGGTA | |
| | TSESATPESGPGSEP | | CTTCTCCTAGCGGCGAATCTTCTACCG | |
| | ATSGSETPGTSESAT | | CACCAGGTTCTACTAGCGAATCCCCG | |
| | PESGPGSEPATSGSE | | TCTGGTACCGCACCAGGTACTTCTACC | |
| | TPGTSESATPESGPG | | CCGGAAAGCGGCTCTGCTTCTCCAGG | |
| | TSTEPSEGSAPGSPA | | TACTTCTACCCCGGAAAGCGGCTCCG | |
| | GSPTSTEEGTSESATP | | CATCTCCAGGTTCTACTAGCGAATCTC | |
| | ESGPGSEPATSGSET | | CTTCTGGTACCGCTCCAGGTACTTCTA | |
| | PGTSESATPESGPGSP | | CCCCTGAAAGCGGCTCCGCTTCTCCA | |
| | AGSPTSTEEGSPAGS | | GGTTCCACTAGCTCTACCGCTGAATCT | |
| | PTSTEEGTSTEPSEGS | | CCGGGTCCAGGTTCTACCAGCGAATC | |
| | APGTSESATPESGPG | | TCCTTCTGGCACCGCTCCAGGTTCTAC | |
| | TSESATPESGPGTSES | | TAGCGAATCCCCGTCTGGTACCGCAC | |
| | ATPESGPGSEPATSG | | CAGGTACTTCTCCTAGCGGCGAATCTT | |
| | SETPGSEPATSGSETP | | CTACCGCACCAGGTTCTACCAGCTCTA | |
| | GSPAGSPTSTEEGTS | | CTGCTGAATCTCCGGGTCCAGGTACTT | |
| | TEPSEGSAPGTSTEPS | | CCCCGAGCGGTGAATCTTCTACTGCA | |
| | EGSAPGSEPATSGSE | | CCAGGTACTTCTACTCCGGAAAGCGG | |
| | TPGTSESATPESGPG | | TTCCGCTTCTCCAGGTACCTCCCCTAG | |
| | TSTEPSEGSAP | | CGGCGAATCTTCTACTGCTCCAGGTAC | |
| | | | CTCTCCTAGCGGCGAATCTTCTACCGC | |
| | | | TCCAGGTACCTCCCCTAGCGGTGAAT | |
| | | | CTTCTACCGCACCAGGTTCTACTAGCT | |
| | | | CTACTGCTGAATCTCCGGGTCCAGGTT | |
| | | | CTACCAGCTCTACTGCTGAATCTCCTG | |
| | | | GTCCAGGTACCTCCCCGAGCGGTGAA | |
| | | | TCTTCTACTGCACCAGGTTCTAGCCCT | |
| | | | TCTGCTTCCACCGGTACCGGCCCAGGT | |
| | | | AGCTCTACTCCGTCTGGTGCAACTGGC | |
| | | | TCTCCAGGTAGCTCTACTCCGTCTGGT | |
| | | | GCAACCGGCTCCCCAGGTTTTCCGACT | |
| | | | ATTCCGCTGTCTCGTCTGTTTGATAAT | |
| | | | GCTATGCTGCGTGCGCACCGTCTGCA | |
| | | | CCAGCTGGCCTTTGATACTTACCAGG | |
| | | | AATTTGAAGAAGCcTACATTCCTAAAG | |
| | | | AGCAGAAGTACTCTTTCCTGCAAAAC | |
| | | | CCACAGACTTCTCTCTGCTTCAGCGAA | |
| | | | TCTATTCCGACGCCTTCCAATCGCGAG | |
| | | | GAAACTCAGCAAAAGTCCAATCTGGA | |
| | | | ACTACTCCGCATTTCTCTGCTTCTGAT | |
| | | | TCAGAGCTGGCTAGAACCAGTGCAAT | |
| | | | TTCTGCGTTCCGTCTTCGCCAATAGCC | |
| | | | TAGTTTATGGCGCATCCGACAGCAAC | |
| | | | GTATACGATCTCCTGAAAGATCTCGA | |
| | | | GGAAGGCATTCAGACCCTGATGGGTC | |
| | | | GTCTCGAGGATGGCTCTCCGCGTACT | |
| | | | GGTCAGATCTTCAAGCAGACTTACTCT | |
| | | | AAATTTGATACTAACAGCCACAATGA | |
| | | | CGATGCGCTTCTAAAAAACTATGGTC | |
| | | | TGCTGTATTGTTTTCGTAAAGATATGG | |
| | | | ACAAAGTTGAAACCTTCCTGCGTATT | |
| | | | GTTCAGTGTCGTTCCGTTGAGGGCAG | |
| | | | CTGTGGTTTCTAAGGTGGTACCTCTGA | |
| | | | AAGCGCAACTCCTGAGTCTGGCCCAG | |
| | | | GTAGCGAACCTGCTACCTCCGGCTCT | |
| | | | GAGACTCCAGGTACCTCTGAAAGCGC | |
| | | | AACCCCGGAATCTGGTCCAGGTAGCG | |
| | | | AACCTGCAACCTCTGGCTCTGAAACC | |
| | | | CCAGGTACCTCTGAAAGCGCTACTCC | |
| | | | TGAATCTGGCCCAGGTACTTCTACTGA | |
| | | | ACCGTCCGAGGGCAGCGCACCAGGTA | |
| | | | GCCCTGCTGGCTCTCCAACCTCCACCG | |
| | | | AAGAAGGTACCTCTGAAAGCGCAACC | |
| | | | CCTGAATCCGGCCCAGGTAGCGAACC | |
| | | | GGCAACCTCCGGTTCTGAAACCCCAG | |
| | | | GTACTTCTGAAAGCGCTACTCCTGAGT | |
| | | | CCGGCCCAGGTAGCCCGGCTGGCTCT | |
| | | | CCGACTTCCACCGAGGAAGGTAGCCC | |
| | | | GGCTGGCTCTCCAACTTCTACTGAAG | |
| | | | AAGGTACTTCTACCGAACCTTCCGAG | |
| | | | GGCAGCGCACCAGGTACTTCTGAAAG | |
| | | | CGCTACCCCTGAGTCCGGCCCAGGTA | |
| | | | CTTCTGAAAGCGCTACTCCTGAATCCG | |
| | | | GTCCAGGTACTTCTGAAAGCGCTACC | |
| | | | CCGGAATCTGGCCCAGGTAGCGAACC | |
| | | | GGCTACTTCTGGTTCTGAAACCCCAG | |
| | | | GTAGCGAACCGGCTACCTCCGGTTCT | |
| | | | GAAACTCCAGGTAGCCCAGCAGGCTC | |
| | | | TCCGACTTCCACTGAGGAAGGTACTT | |
| | | | CTACTGAACCTTCCGAAGGCAGCGCA | |
| | | | CCAGGTACCTCTACTGAACCTTCTGAG | |
| | | | GGCAGCGCTCCAGGTAGCGAACCTGC | |
| | | | AACCTCTGGCTCTGAAACCCCAGGTA | |
| | | | CCTCTGAAAGCGCTACTCCTGAATCTG | |
| | | | GCCCAGGTACTTCTACTGAACCGTCC | |
| | | | GAGGGCAGCGCACCA | |
| AG864- | GASPGTSSTGSPGSS | 787 | GGTGCTTCCCCGGGCACCAGCTCTACT | 788 |
| hGH- | PSASTGTGPGSSPSA | | GGTTCTCCAGGTTCTAGCCCGTCTGCT | |
| AE288 | STGTGPGTPGSGTAS | | TCTACTGGTACTGGTCCAGGTTCTAGC | |
| | SSPGSSTPSGATGSP | | CCTTCTGCTTCCACTGGTACTGGTCCA | |
| | GSNPSASTGTGPGAS | | GGTACCCCGGGTAGCGGTACCGCTTC | |
| | PGTSSTGSPGTPGSG | | TTCTTCTCCAGGTAGCTCTACTCCGTC | |
| | TASSSPGSSTPSGAT | | TGGTGCTACCGGCTCTCCAGGTTCTAA | |
| | GSPGTPGSGTASSSP | | CCCTTCTGCATCCACCGGTACCGGCCC | |
| | GASPGTSSTGSPGAS | | AGGTGCTTCTCCGGGCACCAGCTCTA | |
| | PGTSSTGSPGTPGSG | | CTGGTTCTCCAGGTACCCCGGGCAGC | |
| | TASSSPGSSTPSGAT | | GGTACCGCATCTTCTTCTCCAGGTAGC | |
| | GSPGASPGTSSTGSP | | TCTACTCCTTCTGGTGCAACTGGTTCT | |
| | GTPGSGTASSSPGSS | | CCAGGTACTCCTGGCAGCGGTACCGC | |
| | TPSGATGSPGSNPSA | | TTCTTCTTCTCCAGGTGCTTCTCCTGG | |
| | STGTGPGSSPSASTG | | TACTAGCTCTACTGGTTCTCCAGGTGC | |
| | TGPGSSTPSGATGSP | | TTCTCCGGGCACTAGCTCTACTGGTTC | |
| | GSSTPSGATGSPGAS | | TCCAGGTACCCCGGGTAGCGGTACTG | |
| | PGTSSTGSPGASPGT | | CTTCTTCCTCTCCAGGTAGCTCTACCC | |
| | SSTGSPGASPGTSST | | CTTCTGGTGCAACCGGCTCTCCAGGTG | |
| | GSPGTPGSGTASSSP | | CTTCTCCGGGCACCAGCTCTACCGGTT | |
| | GASPGTSSTGSPGAS | | CTCCAGGTACCCCGGGTAGCGGTACC | |
| | PGTSSTGSPGASPGT | | GCTTCTTCTTCTCCAGGTAGCTCTACT | |
| | SSTGSPGSSPSASTGT | | CCGTCTGGTGCTACCGGCTCTCCAGGT | |
| | GPGTPGSGTASSSPG | | TCTAACCCTTCTGCATCCACCGGTACC | |
| | ASPGTSSTGSPGASP | | GGCCCAGGTTCTAGCCCTTCTGCTTCC | |
| | GTSSTGSPGASPGTS | | ACCGGTACTGGCCCAGGTAGCTCTAC | |
| | STGSPGSSTPSGATG | | CCCTTCTGGTGCTACCGGCTCCCCAGG | |
| | SPGSSTPSGATGSPG | | TAGCTCTACTCCTTCTGGTGCAACTGG | |
| | ASPGTSSTGSPGTPG | | CTCTCCAGGTGCATCTCCGGGCACTA | |
| | SGTASSSPGSSTPSG | | GCTCTACTGGTTCTCCAGGTGCATCCC | |
| | ATGSPGSSTPSGATG | | CTGGCACTAGCTCTACTGGTTCTCCAG | |
| | SPGSSTPSGATGSPG | | GTGCTTCTCCTGGTACCAGCTCTACTG | |
| | SSPSASTGTGPGASP | | GTTCTCCAGGTACTCCTGGCAGCGGT | |
| | GTSSTGSPGASPGTS | | ACCGCTTCTTCTTCTCCAGGTGCTTCT | |
| | STGSPGTPGSGTASS | | CCTGGTACTAGCTCTACTGGTTCTCCA | |
| | SPGASPGTSSTGSPG | | GGTGCTTCTCCGGGCACTAGCTCTACT | |
| | ASPGTSSTGSPGASP | | GGTTCTCCAGGTGCTTCCCCGGGCACT | |
| | GTSSTGSPGASPGTS | | AGCTCTACCGGTTCTCCAGGTTCTAGC | |
| | STGSPGTPGSGTASS | | CCTTCTGCATCTACTGGTACTGGCCCA | |
| | SPGSSTPSGATGSPG | | GGTACTCCGGGCAGCGGTACTGCTTC | |
| | TPGSGTASSSPGSSTP | | TTCCTCTCCAGGTGCATCTCCGGGCAC | |
| | SGATGSPGTPGSGTA | | TAGCTCTACTGGTTCTCCAGGTGCATC | |
| | SSSPGSSTPSGATGSP | | CCCTGGCACTAGCTCTACTGGTTCTCC | |
| | GSSTPSGATGSPGSS | | AGGTGCTTCTCCTGGTACCAGCTCTAC | |
| | PSASTGTGPGSSPSA | | TGGTTCTCCAGGTAGCTCTACTCCGTC | |
| | STGTGPGASPGTSST | | TGGTGCAACCGGTTCCCCAGGTAGCT | |
| | GSPGTPGSGTASSSP | | CTACTCCTTCTGGTGCTACTGGCTCCC | |
| | GSSTPSGATGSPGSS | | CAGGTGCATCCCCTGGCACCAGCTCT | |
| | PSASTGTGPGSSPSA | | ACCGGTTCTCCAGGTACCCCGGGCAG | |
| | STGTGPGASPGTSST | | CGGTACCGCATCTTCCTCTCCAGGTAG | |
| | GSPGASPGTSSTGSP | | CTCTACCCCGTCTGGTGCTACCGGTTC | |
| | GSSTPSGATGSPGSS | | CCCAGGTAGCTCTACCCCGTCTGGTGC | |
| | PSASTGTGPGASPGT | | AACCGGCTCCCCAGGTAGCTCTACTC | |
| | SSTGSPGSSPSASTGT | | CGTCTGGTGCAACCGGCTCCCCAGGT | |
| | GPGTPGSGTASSSPG | | TCTAGCCCGTCTGCTTCCACTGGTACT | |
| | SSTPSGATGSPGSSTP | | GGCCCAGGTGCTTCCCCGGGCACCAG | |
| | SGATGSPGASPGTSS | | CTCTACTGGTTCTCCAGGTGCATCCCC | |
| | TGSPGFPTIPLSRLFD | | GGGTACCAGCTCTACCGGTTCTCCAG | |
| | NAMLRAHRLHQLAF | | GTACTCCTGGCAGCGGTACTGCATCTT | |
| | DTYQEFEEAYIPKEQ | | CCTCTCCAGGTGCTTCTCCGGGCACCA | |
| | KYSFLQNPQTSLCFS | | GCTCTACTGGTTCTCCAGGTGCATCTC | |
| | ESIPTPSNREETQQKS | | CGGGCACTAGCTCTACTGGTTCTCCAG | |
| | NLELLRISLLLIQSWL | | GTGCATCCCCTGGCACTAGCTCTACTG | |
| | EPVQFLRSVFANSLV | | GTTCTCCAGGTGCTTCTCCTGGTACCA | |
| | YGASDSNVYDLLKD | | GCTCTACTGGTTCTCCAGGTACCCCTG | |
| | LEEGIQTLMGRLEDG | | GTAGCGGTACTGCTTCTTCCTCTCCAG | |
| | SPRTGQIFKQTYSKF | | GTAGCTCTACTCCGTCTGGTGCTACCG | |
| | DTNSHNDDALLKNY | | GTTCTCCAGGTACCCCGGGTAGCGGT | |
| | GLLYCFRKDMDKVE | | ACCGCATCTTCTTCTCCAGGTAGCTCT | |
| | TFLRIVQCRSVEGSC | | ACCCCGTCTGGTGCTACTGGTTCTCCA | |
| | GFGGTSESATPESGP | | GGTACTCCGGGCAGCGGTACTGCTTC | |
| | GSEPATSGSETPGTS | | TTCCTCTCCAGGTAGCTCTACCCCTTC | |
| | ESATPESGPGSEPAT | | TGGTGCTACTGGCTCTCCAGGTAGCTC | |
| | SGSETPGTSESATPES | | TACCCCGTCTGGTGCTACTGGCTCCCC | |
| | GPGTSTEPSEGSAPG | | AGGTTCTAGCCCTTCTGCATCCACCGG | |
| | SPAGSPTSTEEGTSES | | TACCGGTCCAGGTTCTAGCCCGTCTGC | |
| | ATPESGPGSEPATSG | | ATCTACTGGTACTGGTCCAGGTGCATC | |
| | SETPGTSESATPESGP | | CCCGGGCACTAGCTCTACCGGTTCTCC | |
| | GSPAGSPTSTEEGSP | | AGGTACTCCTGGTAGCGGTACTGCTTC | |
| | AGSPTSTEEGTSTEPS | | TTCTTCTCCAGGTAGCTCTACTCCTTC | |
| | EGSAPGTSESATPES | | TGGTGCTACTGGTTCTCCAGGTTCTAG | |
| | GPGTSESATPESGPG | | CCCTTCTGCATCCACCGGTACCGGCCC | |
| | TSESATPESGPGSEP | | AGGTTCTAGCCCGTCTGCTTCTACCGG | |
| | ATSGSETPGSEPATS | | TACTGGTCCAGGTGCTTCTCCGGGTAC | |
| | GSETPGSPAGSPTST | | TAGCTCTACTGGTTCTCCAGGTGCATC | |
| | EEGTSTEPSEGSAPG | | TCCTGGTACTAGCTCTACTGGTTCTCC | |
| | TSTEPSEGSAPGSEP | | AGGTAGCTCTACTCCGTCTGGTGCAA | |
| | ATSGSETPGTSESAT | | CCGGCTCTCCAGGTTCTAGCCCTTCTG | |
| | PESGPGTSTEPSEGS | | CATCTACCGGTACTGGTCCAGGTGCA | |
| | AP | | TCCCCTGGTACCAGCTCTACCGGTTCT | |
| | | | CCAGGTTCTAGCCCTTCTGCTTCTACC | |
| | | | GGTACCGGTCCAGGTACCCCTGGCAG | |
| | | | CGGTACCGCATCTTCCTCTCCAGGTAG | |
| | | | CTCTACTCCGTCTGGTGCAACCGGTTC | |
| | | | CCCAGGTAGCTCTACTCCTTCTGGTGC | |
| | | | TACTGGCTCCCCAGGTGCATCCCCTGG | |
| | | | CACCAGCTCTACCGGTTCTCCAGGTTT | |
| | | | TCCGACTATTCCGCTGTCTCGTCTGTT | |
| | | | TGATAATGCTATGCTGCGTGCGCACC | |
| | | | GTCTGCACCAGCTGGCCTTTGATACTT | |
| | | | ACCAGGAATTTGAAGAAGCcTACATT | |
| | | | CCTAAAGAGCAGAAGTACTCTTTCCT | |
| | | | GCAAAACCCACAGACTTCTCTCTGCTT | |
| | | | CAGCGAATCTATTCCGACGCCTTCCA | |
| | | | ATCGCGAGGAAACTCAGCAAAAGTCC | |
| | | | AATCTGGAACTACTCCGCATTTCTCTG | |
| | | | CTTCTGATTCAGAGCTGGCTAGAACC | |
| | | | AGTGCAATTTCTGCGTTCCGTCTTCGC | |
| | | | CAATAGCCTAGTTTATGGCGCATCCG | |
| | | | ACAGCAACGTATACGATCTCCTGAAA | |
| | | | GATCTCGAGGAAGGCATTCAGACCCT | |
| | | | GATGGGTCGTCTCGAGGATGGCTCTC | |
| | | | CGCGTACTGGTCAGATCTTCAAGCAG | |
| | | | ACTTACTCTAAATTTGATACTAACAGC | |
| | | | CACAATGACGATGCGCTTCTAAAAAA | |
| | | | CTATGGTCTGCTGTATTGTTTTCGTAA | |
| | | | AGATATGGACAAAGTTGAAACCTTCC | |
| | | | TGCGTATTGTTCAGTGTCGTTCCGTTG | |
| | | | AGGGCAGCTGTGGTTTCTAAGGTGGT | |
| | | | ACCTCTGAAAGCGCAACTCCTGAGTC | |
| | | | TGGCCCAGGTAGCGAACCTGCTACCT | |
| | | | CCGGCTCTGAGACTCCAGGTACCTCT | |
| | | | GAAAGCGCAACCCCGGAATCTGGTCC | |
| | | | AGGTAGCGAACCTGCAACCTCTGGCT | |
| | | | CTGAAACCCCAGGTACCTCTGAAAGC | |
| | | | GCTACTCCTGAATCTGGCCCAGGTACT | |
| | | | TCTACTGAACCGTCCGAGGGCAGCGC | |
| | | | ACCAGGTAGCCCTGCTGGCTCTCCAA | |
| | | | CCTCCACCGAAGAAGGTACCTCTGAA | |
| | | | AGCGCAACCCCTGAATCCGGCCCAGG | |
| | | | TAGCGAACCGGCAACCTCCGGTTCTG | |
| | | | AAACCCCAGGTACTTCTGAAAGCGCT | |
| | | | ACTCCTGAGTCCGGCCCAGGTAGCCC | |
| | | | GGCTGGCTCTCCGACTTCCACCGAGG | |
| | | | AAGGTAGCCCGGCTGGCTCTCCAACT | |
| | | | TCTACTGAAGAAGGTACTTCTACCGA | |
| | | | ACCTTCCGAGGGCAGCGCACCAGGTA | |
| | | | CTTCTGAAAGCGCTACCCCTGAGTCC | |
| | | | GGCCCAGGTACTTCTGAAAGCGCTAC | |
| | | | TCCTGAATCCGGTCCAGGTACTTCTGA | |
| | | | AAGCGCTACCCCGGAATCTGGCCCAG | |
| | | | GTAGCGAACCGGCTACTTCTGGTTCTG | |
| | | | AAACCCCAGGTAGCGAACCGGCTACC | |
| | | | TCCGGTTCTGAAACTCCAGGTAGCCC | |
| | | | AGCAGGCTCTCCGACTTCCACTGAGG | |
| | | | AAGGTACTTCTACTGAACCTTCCGAA | |
| | | | GGCAGCGCACCAGGTACCTCTACTGA | |
| | | | ACCTTCTGAGGGCAGCGCTCCAGGTA | |
| | | | GCGAACCTGCAACCTCTGGCTCTGAA | |
| | | | ACCCCAGGTACCTCTGAAAGCGCTAC | |
| | | | TCCTGAATCTGGCCCAGGTACTTCTAC | |
| | | | TGAACCGTCCGAGGGCAGCGCACCA | |
| AM875- | GTSTEPSEGSAPGSE | 789 | GGTACTTCTACTGAACCGTCTGAAGG | 790 |
| hGH- | PATSGSETPGSPAGS | | CAGCGCACCAGGTAGCGAACCGGCTA | |
| AE288 | PTSTEEGSTSSTAESP | | CTTCCGGTTCTGAAACCCCAGGTAGC | |
| | GPGTSTPESGSASPG | | CCAGCAGGTTCTCCAACTTCTACTGAA | |
| | STSESPSGTAPGSTSE | | GAAGGTTCTACCAGCTCTACCGCAGA | |
| | SPSGTAPGTSTPESGS | | ATCTCCTGGTCCAGGTACCTCTACTCC | |
| | ASPGTSTPESGSASP | | GGAAAGCGGCTCTGCATCTCCAGGTT | |
| | GSEPATSGSETPGTS | | CTACTAGCGAATCTCCTTCTGGCACTG | |
| | ESATPESGPGSPAGS | | CACCAGGTTCTACTAGCGAATCCCCG | |
| | PTSTEEGTSTEPSEGS | | TCTGGTACTGCTCCAGGTACTTCTACT | |
| | APGTSESATPESGPG | | CCTGAAAGCGGTTCCGCTTCTCCAGGT | |
| | TSTEPSEGSAPGTSTE | | ACCTCTACTCCGGAAAGCGGTTCTGC | |
| | PSEGSAPGSPAGSPT | | ATCTCCAGGTAGCGAACCGGCAACCT | |
| | STEEGTSTEPSEGSAP | | CCGGCTCTGAAACCCCAGGTACCTCT | |
| | GTSTEPSEGSAPGTS | | GAAAGCGCTACTCCTGAATCCGGCCC | |
| | ESATPESGPGTSESA | | AGGTAGCCCGGCAGGTTCTCCGACTT | |
| | TPESGPGTSTEPSEGS | | CCACTGAGGAAGGTACCTCTACTGAA | |
| | APGTSTEPSEGSAPG | | CCTTCTGAGGGCAGCGCTCCAGGTAC | |
| | TSESATPESGPGTSTE | | TTCTGAAAGCGCTACCCCGGAGTCCG | |
| | PSEGSAPGSEPATSG | | GTCCAGGTACTTCTACTGAACCGTCCG | |
| | SETPGSPAGSPTSTEE | | AAGGTAGCGCACCAGGTACTTCTACC | |
| | GSSTPSGATGSPGTP | | GAACCGTCCGAGGGTAGCGCACCAGG | |
| | GSGTASSSPGSSTPS | | TAGCCCAGCAGGTTCTCCTACCTCCAC | |
| | GATGSPGTSTEPSEG | | CGAGGAAGGTACTTCTACCGAACCGT | |
| | SAPGTSTEPSEGSAP | | CCGAGGGTAGCGCACCAGGTACTTCT | |
| | GSEPATSGSETPGSP | | ACCGAACCTTCCGAGGGCAGCGCACC | |
| | AGSPTSTEEGSPAGS | | AGGTACTTCTGAAAGCGCTACCCCTG | |
| | PTSTEEGTSTEPSEGS | | AGTCCGGCCCAGGTACTTCTGAAAGC | |
| | APGASASGAPSTGGT | | GCTACTCCTGAATCCGGTCCAGGTAC | |
| | SESATPESGPGSPAG | | CTCTACTGAACCTTCCGAAGGCAGCG | |
| | SPTSTEEGSPAGSPTS | | CTCCAGGTACCTCTACCGAACCGTCC | |
| | TEEGSTSSTAESPGP | | GAGGGCAGCGCACCAGGTACTTCTGA | |
| | GSTSESPSGTAPGTSP | | AAGCGCAACCCCTGAATCCGGTCCAG | |
| | SGESSTAPGTPGSGT | | GTACTTCTACTGAACCTTCCGAAGGTA | |
| | ASSSPGSSTPSGATG | | GCGCTCCAGGTAGCGAACCTGCTACT | |
| | SPGSSPSASTGTGPG | | TCTGGTTCTGAAACCCCAGGTAGCCC | |
| | SEPATSGSETPGTSES | | GGCTGGCTCTCCGACCTCCACCGAGG | |
| | ATPESGPGSEPATSG | | AAGGTAGCTCTACCCCGTCTGGTGCT | |
| | SETPGSTSSTAESPGP | | ACTGGTTCTCCAGGTACTCCGGGCAG | |
| | GSTSSTAESPGPGTSP | | CGGTACTGCTTCTTCCTCTCCAGGTAG | |
| | SGESSTAPGSEPATS | | CTCTACCCCTTCTGGTGCTACTGGCTC | |
| | GSETPGSEPATSGSE | | TCCAGGTACCTCTACCGAACCGTCCG | |
| | TPGTSTEPSEGSAPG | | AGGGTAGCGCACCAGGTACCTCTACT | |
| | STSSTAESPGPGTSTP | | GAACCGTCTGAGGGTAGCGCTCCAGG | |
| | ESGSASPGSTSESPSG | | TAGCGAACCGGCAACCTCCGGTTCTG | |
| | TAPGTSTEPSEGSAP | | AAACTCCAGGTAGCCCTGCTGGCTCT | |
| | GTSTEPSEGSAPGTS | | CCGACTTCTACTGAGGAAGGTAGCCC | |
| | TEPSEGSAPGSSTPSG | | GGCTGGTTCTCCGACTTCTACTGAGGA | |
| | ATGSPGSSPSASTGT | | AGGTACTTCTACCGAACCTTCCGAAG | |
| | GPGASPGTSSTGSPG | | GTAGCGCTCCAGGTGCAAGCGCAAGC | |
| | SEPATSGSETPGTSES | | GGCGCGCCAAGCACGGGAGGTACTTC | |
| | ATPESGPGSPAGSPT | | TGAAAGCGCTACTCCTGAGTCCGGCC | |
| | STEEGSSTPSGATGS | | CAGGTAGCCCGGCTGGCTCTCCGACT | |
| | PGSSPSASTGTGPGA | | TCCACCGAGGAAGGTAGCCCGGCTGG | |
| | SPGTSSTGSPGTSESA | | CTCTCCAACTTCTACTGAAGAAGGTTC | |
| | TPESGPGTSTEPSEGS | | TACCAGCTCTACCGCTGAATCTCCTGG | |
| | APGTSTEPSEGSAPG | | CCCAGGTTCTACTAGCGAATCTCCGTC | |
| | FPTIPLSRLFDNAML | | TGGCACCGCACCAGGTACTTCCCCTA | |
| | RAHRLHQLAFDTYQ | | GCGGTGAATCTTCTACTGCACCAGGT | |
| | EFEEAYIPKEQKYSF | | ACCCCTGGCAGCGGTACCGCTTCTTCC | |
| | LQNPQTSLCFSESIPT | | TCTCCAGGTAGCTCTACCCCGTCTGGT | |
| | PSNREETQQKSNLEL | | GCTACTGGCTCTCCAGGTTCTAGCCCG | |
| | LRISLLLIQSWLEPVQ | | TCTGCATCTACCGGTACCGGCCCAGG | |
| | FLRSVFANSLVYGAS | | TAGCGAACCGGCAACCTCCGGCTCTG | |
| | DSNVYDLLKDLEEGI | | AAACTCCAGGTACTTCTGAAAGCGCT | |
| | QTLMGRLEDGSPRT | | ACTCCGGAATCCGGCCCAGGTAGCGA | |
| | GQIFKQTYSKFDTNS | | ACCGGCTACTTCCGGCTCTGAAACCC | |
| | HNDDALLKNYGLLY | | CAGGTTCCACCAGCTCTACTGCAGAA | |
| | CFRKDMDKVETFLRI | | TCTCCGGGCCCAGGTTCTACTAGCTCT | |
| | VQCRSVEGSCGFGG | | ACTGCAGAATCTCCGGGTCCAGGTAC | |
| | TSESATPESGPGSEP | | TTCTCCTAGCGGCGAATCTTCTACCGC | |
| | ATSGSETPGTSESAT | | TCCAGGTAGCGAACCGGCAACCTCTG | |
| | PESGPGSEPATSGSE | | GCTCTGAAACTCCAGGTAGCGAACCT | |
| | TPGTSESATPESGPG | | GCAACCTCCGGCTCTGAAACCCCAGG | |
| | TSTEPSEGSAPGSPA | | TACTTCTACTGAACCTTCTGAGGGCAG | |
| | GSPTSTEEGTSESATP | | CGCACCAGGTTCTACCAGCTCTACCG | |
| | ESGPGSEPATSGSET | | CAGAATCTCCTGGTCCAGGTACCTCTA | |
| | PGTSESATPESGPGSP | | CTCCGGAAAGCGGCTCTGCATCTCCA | |
| | AGSPTSTEEGSPAGS | | GGTTCTACTAGCGAATCTCCTTCTGGC | |
| | PTSTEEGTSTEPSEGS | | ACTGCACCAGGTACTTCTACCGAACC | |
| | APGTSESATPESGPG | | GTCCGAAGGCAGCGCTCCAGGTACCT | |
| | TSESATPESGPGTSES | | CTACTGAACCTTCCGAGGGCAGCGCT | |
| | ATPESGPGSEPATSG | | CCAGGTACCTCTACCGAACCTTCTGA | |
| | SETPGSEPATSGSETP | | AGGTAGCGCACCAGGTAGCTCTACTC | |
| | GSPAGSPTSTEEGTS | | CGTCTGGTGCAACCGGCTCCCCAGGT | |
| | TEPSEGSAPGTSTEPS | | TCTAGCCCGTCTGCTTCCACTGGTACT | |
| | EGSAPGSEPATSGSE | | GGCCCAGGTGCTTCCCCGGGCACCAG | |
| | TPGTSESATPESGPG | | CTCTACTGGTTCTCCAGGTAGCGAACC | |
| | TSTEPSEGSAP | | TGCTACCTCCGGTTCTGAAACCCCAG | |
| | | | GTACCTCTGAAAGCGCAACTCCGGAG | |
| | | | TCTGGTCCAGGTAGCCCTGCAGGTTCT | |
| | | | CCTACCTCCACTGAGGAAGGTAGCTC | |
| | | | TACTCCGTCTGGTGCAACCGGCTCCCC | |
| | | | AGGTTCTAGCCCGTCTGCTTCCACTGG | |
| | | | TACTGGCCCAGGTGCTTCCCCGGGCA | |
| | | | CCAGCTCTACTGGTTCTCCAGGTACCT | |
| | | | CTGAAAGCGCTACTCCGGAGTCTGGC | |
| | | | CCAGGTACCTCTACTGAACCGTCTGA | |
| | | | GGGTAGCGCTCCAGGTACTTCTACTG | |
| | | | AACCGTCCGAAGGTAGCGCACCAGGT | |
| | | | TTTCCGACTATTCCGCTGTCTCGTCTG | |
| | | | TTTGATAATGCTATGCTGCGTGCGCAC | |
| | | | CGTCTGCACCAGCTGGCCTTTGATACT | |
| | | | TACCAGGAATTTGAAGAAGCcTACATT | |
| | | | CCTAAAGAGCAGAAGTACTCTTTCCT | |
| | | | GCAAAACCCACAGACTTCTCTCTGCTT | |
| | | | CAGCGAATCTATTCCGACGCCTTCCA | |
| | | | ATCGCGAGGAAACTCAGCAAAAGTCC | |
| | | | AATCTGGAACTACTCCGCATTTCTCTG | |
| | | | CTTCTGATTCAGAGCTGGCTAGAACC | |
| | | | AGTGCAATTTCTGCGTTCCGTCTTCGC | |
| | | | CAATAGCCTAGTTTATGGCGCATCCG | |
| | | | ACAGCAACGTATACGATCTCCTGAAA | |
| | | | GATCTCGAGGAAGGCATTCAGACCCT | |
| | | | GATGGGTCGTCTCGAGGATGGCTCTC | |
| | | | CGCGTACTGGTCAGATCTTCAAGCAG | |
| | | | ACTTACTCTAAATTTGATACTAACAGC | |
| | | | CACAATGACGATGCGCTTCTAAAAAA | |
| | | | CTATGGTCTGCTGTATTGTTTTCGTAA | |
| | | | AGATATGGACAAAGTTGAAACCTTCC | |
| | | | TGCGTATTGTTCAGTGTCGTTCCGTTG | |
| | | | AGGGCAGCTGTGGTTTCTAAGGTGGT | |
| | | | ACCTCTGAAAGCGCAACTCCTGAGTC | |
| | | | TGGCCCAGGTAGCGAACCTGCTACCT | |
| | | | CCGGCTCTGAGACTCCAGGTACCTCT | |
| | | | GAAAGCGCAACCCCGGAATCTGGTCC | |
| | | | AGGTAGCGAACCTGCAACCTCTGGCT | |
| | | | CTGAAACCCCAGGTACCTCTGAAAGC | |
| | | | GCTACTCCTGAATCTGGCCCAGGTACT | |
| | | | TCTACTGAACCGTCCGAGGGCAGCGC | |
| | | | ACCAGGTAGCCCTGCTGGCTCTCCAA | |
| | | | CCTCCACCGAAGAAGGTACCTCTGAA | |
| | | | AGCGCAACCCCTGAATCCGGCCCAGG | |
| | | | TAGCGAACCGGCAACCTCCGGTTCTG | |
| | | | AAACCCCAGGTACTTCTGAAAGCGCT | |
| | | | ACTCCTGAGTCCGGCCCAGGTAGCCC | |
| | | | GGCTGGCTCTCCGACTTCCACCGAGG | |
| | | | AAGGTAGCCCGGCTGGCTCTCCAACT | |
| | | | TCTACTGAAGAAGGTACTTCTACCGA | |
| | | | ACCTTCCGAGGGCAGCGCACCAGGTA | |
| | | | CTTCTGAAAGCGCTACCCCTGAGTCC | |
| | | | GGCCCAGGTACTTCTGAAAGCGCTAC | |
| | | | TCCTGAATCCGGTCCAGGTACTTCTGA | |
| | | | AAGCGCTACCCCGGAATCTGGCCCAG | |
| | | | GTAGCGAACCGGCTACTTCTGGTTCTG | |
| | | | AAACCCCAGGTAGCGAACCGGCTACC | |
| | | | TCCGGTTCTGAAACTCCAGGTAGCCC | |
| | | | AGCAGGCTCTCCGACTTCCACTGAGG | |
| | | | AAGGTACTTCTACTGAACCTTCCGAA | |
| | | | GGCAGCGCACCAGGTACCTCTACTGA | |
| | | | ACCTTCTGAGGGCAGCGCTCCAGGTA | |
| | | | GCGAACCTGCAACCTCTGGCTCTGAA | |
| | | | ACCCCAGGTACCTCTGAAAGCGCTAC | |
| | | | TCCTGAATCTGGCCCAGGTACTTCTAC | |
| | | | TGAACCGTCCGAGGGCAGCGCACCA | |
| AE912- | MAEPAGSPTSTEEGT | 791 | ATGGCTGAACCTGCTGGCTCTCCAAC | 792 |
| hGH- | PGSGTASSSPGSSTPS | | CTCCACTGAGGAAGGTACCCCGGGTA | |
| AE288 | GATGSPGASPGTSST | | GCGGTACTGCTTCTTCCTCTCCAGGTA | |
| | GSPGSPAGSPTSTEE | | GCTCTACCCCTTCTGGTGCAACCGGCT | |
| | GTSESATPESGPGTS | | CTCCAGGTGCTTCTCCGGGCACCAGCT | |
| | TEPSEGSAPGSPAGS | | CTACCGGTTCTCCAGGTAGCCCGGCT | |
| | PTSTEEGTSTEPSEGS | | GGCTCTCCTACCTCTACTGAGGAAGG | |
| | APGTSTEPSEGSAPG | | TACTTCTGAAAGCGCTACTCCTGAGTC | |
| | TSESATPESGPGSEP | | TGGTCCAGGTACCTCTACTGAACCGTC | |
| | ATSGSETPGSEPATS | | CGAAGGTAGCGCTCCAGGTAGCCCAG | |
| | GSETPGSPAGSPTST | | CAGGCTCTCCGACTTCCACTGAGGAA | |
| | EEGTSESATPESGPG | | GGTACTTCTACTGAACCTTCCGAAGG | |
| | TSTEPSEGSAPGTSTE | | CAGCGCACCAGGTACCTCTACTGAAC | |
| | PSEGSAPGSPAGSPT | | CTTCTGAGGGCAGCGCTCCAGGTACT | |
| | STEEGTSTEPSEGSAP | | TCTGAAAGCGCTACCCCGGAATCTGG | |
| | GTSTEPSEGSAPGTS | | CCCAGGTAGCGAACCGGCTACTTCTG | |
| | ESATPESGPGTSTEPS | | GTTCTGAAACCCCAGGTAGCGAACCG | |
| | EGSAPGTSESATPES | | GCTACCTCCGGTTCTGAAACTCCAGGT | |
| | GPGSEPATSGSETPG | | AGCCCGGCAGGCTCTCCGACCTCTAC | |
| | TSTEPSEGSAPGTSTE | | TGAGGAAGGTACTTCTGAAAGCGCAA | |
| | PSEGSAPGTSESATP | | CCCCGGAGTCCGGCCCAGGTACCTCT | |
| | ESGPGTSESATPESG | | ACCGAACCGTCTGAGGGCAGCGCACC | |
| | PGSPAGSPTSTEEGT | | AGGTACTTCTACCGAACCGTCCGAGG | |
| | SESATPESGPGSEPA | | GTAGCGCACCAGGTAGCCCAGCAGGT | |
| | TSGSETPGTSESATPE | | TCTCCTACCTCCACCGAGGAAGGTAC | |
| | SGPGTSTEPSEGSAP | | TTCTACCGAACCGTCCGAGGGTAGCG | |
| | GTSTEPSEGSAPGTS | | CACCAGGTACCTCTACTGAACCTTCTG | |
| | TEPSEGSAPGTSTEPS | | AGGGCAGCGCTCCAGGTACTTCTGAA | |
| | EGSAPGTSTEPSEGS | | AGCGCTACCCCGGAGTCCGGTCCAGG | |
| | APGTSTEPSEGSAPG | | TACTTCTACTGAACCGTCCGAAGGTA | |
| | SPAGSPTSTEEGTSTE | | GCGCACCAGGTACTTCTGAAAGCGCA | |
| | PSEGSAPGTSESATP | | ACCCCTGAATCCGGTCCAGGTAGCGA | |
| | ESGPGSEPATSGSET | | ACCGGCTACTTCTGGCTCTGAGACTCC | |
| | PGTSESATPESGPGS | | AGGTACTTCTACCGAACCGTCCGAAG | |
| | EPATSGSETPGTSES | | GTAGCGCACCAGGTACTTCTACTGAA | |
| | ATPESGPGTSTEPSE | | CCGTCTGAAGGTAGCGCACCAGGTAC | |
| | GSAPGTSESATPESG | | TTCTGAAAGCGCAACCCCGGAATCCG | |
| | PGSPAGSPTSTEEGSP | | GCCCAGGTACCTCTGAAAGCGCAACC | |
| | AGSPTSTEEGSPAGS | | CCGGAGTCCGGCCCAGGTAGCCCTGC | |
| | PTSTEEGTSESATPES | | TGGCTCTCCAACCTCCACCGAAGAAG | |
| | GPGTSTEPSEGSAPG | | GTACCTCTGAAAGCGCAACCCCTGAA | |
| | TSESATPESGPGSEP | | TCCGGCCCAGGTAGCGAACCGGCAAC | |
| | ATSGSETPGTSESAT | | CTCCGGTTCTGAAACCCCAGGTACCTC | |
| | PESGPGSEPATSGSE | | TGAAAGCGCTACTCCGGAGTCTGGCC | |
| | TPGTSESATPESGPG | | CAGGTACCTCTACTGAACCGTCTGAG | |
| | TSTEPSEGSAPGSPA | | GGTAGCGCTCCAGGTACTTCTACTGA | |
| | GSPTSTEEGTSESATP | | ACCGTCCGAAGGTAGCGCACCAGGTA | |
| | ESGPGSEPATSGSET | | CTTCTACCGAACCGTCCGAAGGCAGC | |
| | PGTSESATPESGPGSP | | GCTCCAGGTACCTCTACTGAACCTTCC | |
| | AGSPTSTEEGSPAGS | | GAGGGCAGCGCTCCAGGTACCTCTAC | |
| | PTSTEEGTSTEPSEGS | | CGAACCTTCTGAAGGTAGCGCACCAG | |
| | APGTSESATPESGPG | | GTACTTCTACCGAACCGTCCGAGGGT | |
| | TSESATPESGPGTSES | | AGCGCACCAGGTAGCCCAGCAGGTTC | |
| | ATPESGPGSEPATSG | | TCCTACCTCCACCGAGGAAGGTACTT | |
| | SETPGSEPATSGSETP | | CTACCGAACCGTCCGAGGGTAGCGCA | |
| | GSPAGSPTSTEEGTS | | CCAGGTACCTCTGAAAGCGCAACTCC | |
| | TEPSEGSAPGTSTEPS | | TGAGTCTGGCCCAGGTAGCGAACCTG | |
| | EGSAPGSEPATSGSE | | CTACCTCCGGCTCTGAGACTCCAGGT | |
| | TPGTSESATPESGPG | | ACCTCTGAAAGCGCAACCCCGGAATC | |
| | TSTEPSEGSAPGFPTI | | TGGTCCAGGTAGCGAACCTGCAACCT | |
| | PLSRLFDNAMLRAH | | CTGGCTCTGAAACCCCAGGTACCTCT | |
| | RLHQLAFDTYQEFEE | | GAAAGCGCTACTCCTGAATCTGGCCC | |
| | AYIPKEQKYSFLQNP | | AGGTACTTCTACTGAACCGTCCGAGG | |
| | QTSLCFSESIPTPSNR | | GCAGCGCACCAGGTACTTCTGAAAGC | |
| | EETQQKSNLELLRIS | | GCTACTCCTGAGTCCGGCCCAGGTAG | |
| | LLLIQSWLEPVQFLR | | CCCGGCTGGCTCTCCGACTTCCACCGA | |
| | SVFANSLVYGASDS | | GGAAGGTAGCCCGGCTGGCTCTCCAA | |
| | NVYDLLKDLEEGIQT | | CTTCTACTGAAGAAGGTAGCCCGGCA | |
| | LMGRLEDGSPRTGQI | | GGCTCTCCGACCTCTACTGAGGAAGG | |
| | FKQTYSKFDTNSHN | | TACTTCTGAAAGCGCAACCCCGGAGT | |
| | DDALLKNYGLLYCF | | CCGGCCCAGGTACCTCTACCGAACCG | |
| | RKDMDKVETFLRIV | | TCTGAGGGCAGCGCACCAGGTACCTC | |
| | QCRSVEGSCGFGGTS | | TGAAAGCGCAACTCCTGAGTCTGGCC | |
| | ESATPESGPGSEPAT | | CAGGTAGCGAACCTGCTACCTCCGGC | |
| | SGSETPGTSESATPES | | TCTGAGACTCCAGGTACCTCTGAAAG | |
| | GPGSEPATSGSETPG | | CGCAACCCCGGAATCTGGTCCAGGTA | |
| | TSESATPESGPGTSTE | | GCGAACCTGCAACCTCTGGCTCTGAA | |
| | PSEGSAPGSPAGSPT | | ACCCCAGGTACCTCTGAAAGCGCTAC | |
| | STEEGTSESATPESGP | | TCCTGAATCTGGCCCAGGTACTTCTAC | |
| | GSEPATSGSETPGTS | | TGAACCGTCCGAGGGCAGCGCACCAG | |
| | ESATPESGPGSPAGS | | GTAGCCCTGCTGGCTCTCCAACCTCCA | |
| | PTSTEEGSPAGSPTST | | CCGAAGAAGGTACCTCTGAAAGCGCA | |
| | EEGTSTEPSEGSAPG | | ACCCCTGAATCCGGCCCAGGTAGCGA | |
| | TSESATPESGPGTSES | | ACCGGCAACCTCCGGTTCTGAAACCC | |
| | ATPESGPGTSESATP | | CAGGTACTTCTGAAAGCGCTACTCCT | |
| | ESGPGSEPATSGSET | | GAGTCCGGCCCAGGTAGCCCGGCTGG | |
| | PGSEPATSGSETPGSP | | CTCTCCGACTTCCACCGAGGAAGGTA | |
| | AGSPTSTEEGTSTEPS | | GCCCGGCTGGCTCTCCAACTTCTACTG | |
| | EGSAPGTSTEPSEGS | | AAGAAGGTACTTCTACCGAACCTTCC | |
| | APGSEPATSGSETPG | | GAGGGCAGCGCACCAGGTACTTCTGA | |
| | TSESATPESGPGTSTE | | AAGCGCTACCCCTGAGTCCGGCCCAG | |
| | PSEGSAP | | GTACTTCTGAAAGCGCTACTCCTGAAT | |
| | | | CCGGTCCAGGTACTTCTGAAAGCGCT | |
| | | | ACCCCGGAATCTGGCCCAGGTAGCGA | |
| | | | ACCGGCTACTTCTGGTTCTGAAACCCC | |
| | | | AGGTAGCGAACCGGCTACCTCCGGTT | |
| | | | CTGAAACTCCAGGTAGCCCAGCAGGC | |
| | | | TCTCCGACTTCCACTGAGGAAGGTAC | |
| | | | TTCTACTGAACCTTCCGAAGGCAGCG | |
| | | | CACCAGGTACCTCTACTGAACCTTCTG | |
| | | | AGGGCAGCGCTCCAGGTAGCGAACCT | |
| | | | GCAACCTCTGGCTCTGAAACCCCAGG | |
| | | | TACCTCTGAAAGCGCTACTCCTGAATC | |
| | | | TGGCCCAGGTACTTCTACTGAACCGTC | |
| | | | CGAGGGCAGCGCACCAGGTTTTCCGA | |
| | | | CTATTCCGCTGTCTCGTCTGTTTGATA | |
| | | | ATGCTATGCTGCGTGCGCACCGTCTGC | |
| | | | ACCAGCTGGCCTTTGATACTTACCAG | |
| | | | GAATTTGAAGAAGCcTACATTCCTAAA | |
| | | | GAGCAGAAGTACTCTTTCCTGCAAAA | |
| | | | CCCACAGACTTCTCTCTGCTTCAGCGA | |
| | | | ATCTATTCCGACGCCTTCCAATCGCGA | |
| | | | GGAAACTCAGCAAAAGTCCAATCTGG | |
| | | | AACTACTCCGCATTTCTCTGCTTCTGA | |
| | | | TTCAGAGCTGGCTAGAACCAGTGCAA | |
| | | | TTTCTGCGTTCCGTCTTCGCCAATAGC | |
| | | | CTAGTTTATGGCGCATCCGACAGCAA | |
| | | | CGTATACGATCTCCTGAAAGATCTCG | |
| | | | AGGAAGGCATTCAGACCCTGATGGGT | |
| | | | CGTCTCGAGGATGGCTCTCCGCGTACT | |
| | | | GGTCAGATCTTCAAGCAGACTTACTCT | |
| | | | AAATTTGATACTAACAGCCACAATGA | |
| | | | CGATGCGCTTCTAAAAAACTATGGTC | |
| | | | TGCTGTATTGTTTTCGTAAAGATATGG | |
| | | | ACAAAGTTGAAACCTTCCTGCGTATT | |
| | | | GTTCAGTGTCGTTCCGTTGAGGGCAG | |
| | | | CTGTGGTTTCTAAGGTGGTACCTCTGA | |
| | | | AAGCGCAACTCCTGAGTCTGGCCCAG | |
| | | | GTAGCGAACCTGCTACCTCCGGCTCT | |
| | | | GAGACTCCAGGTACCTCTGAAAGCGC | |
| | | | AACCCCGGAATCTGGTCCAGGTAGCG | |
| | | | AACCTGCAACCTCTGGCTCTGAAACC | |
| | | | CCAGGTACCTCTGAAAGCGCTACTCC | |
| | | | TGAATCTGGCCCAGGTACTTCTACTGA | |
| | | | ACCGTCCGAGGGCAGCGCACCAGGTA | |
| | | | GCCCTGCTGGCTCTCCAACCTCCACCG | |
| | | | AAGAAGGTACCTCTGAAAGCGCAACC | |
| | | | CCTGAATCCGGCCCAGGTAGCGAACC | |
| | | | GGCAACCTCCGGTTCTGAAACCCCAG | |
| | | | GTACTTCTGAAAGCGCTACTCCTGAGT | |
| | | | CCGGCCCAGGTAGCCCGGCTGGCTCT | |
| | | | CCGACTTCCACCGAGGAAGGTAGCCC | |
| | | | GGCTGGCTCTCCAACTTCTACTGAAG | |
| | | | AAGGTACTTCTACCGAACCTTCCGAG | |
| | | | GGCAGCGCACCAGGTACTTCTGAAAG | |
| | | | CGCTACCCCTGAGTCCGGCCCAGGTA | |
| | | | CTTCTGAAAGCGCTACTCCTGAATCCG | |
| | | | GTCCAGGTACTTCTGAAAGCGCTACC | |
| | | | CCGGAATCTGGCCCAGGTAGCGAACC | |
| | | | GGCTACTTCTGGTTCTGAAACCCCAG | |
| | | | GTAGCGAACCGGCTACCTCCGGTTCT | |
| | | | GAAACTCCAGGTAGCCCAGCAGGCTC | |
| | | | TCCGACTTCCACTGAGGAAGGTACTT | |
| | | | CTACTGAACCTTCCGAAGGCAGCGCA | |
| | | | CCAGGTACCTCTACTGAACCTTCTGAG | |
| | | | GGCAGCGCTCCAGGTAGCGAACCTGC | |
| | | | AACCTCTGGCTCTGAAACCCCAGGTA | |
| | | | CCTCTGAAAGCGCTACTCCTGAATCTG | |
| | | | GCCCAGGTACTTCTACTGAACCGTCC | |
| | | | GAGGGCAGCGCACCA | |
| AM923- | MAEPAGSPTSTEEGA | 793 | ATGGCTGAACCTGCTGGCTCTCCAAC | 794 |
| hGH- | SPGTSSTGSPGSSTPS | | CTCCACTGAGGAAGGTGCATCCCCGG | |
| AE288 | GATGSPGSSTPSGAT | | GCACCAGCTCTACCGGTTCTCCAGGT | |
| | GSPGTSTEPSEGSAP | | AGCTCTACCCCGTCTGGTGCTACCGGC | |
| | GSEPATSGSETPGSP | | TCTCCAGGTAGCTCTACCCCGTCTGGT | |
| | AGSPTSTEEGSTSST | | GCTACTGGCTCTCCAGGTACTTCTACT | |
| | AESPGPGTSTPESGS | | GAACCGTCTGAAGGCAGCGCACCAGG | |
| | ASPGSTSESPSGTAP | | TAGCGAACCGGCTACTTCCGGTTCTG | |
| | GSTSESPSGTAPGTS | | AAACCCCAGGTAGCCCAGCAGGTTCT | |
| | TPESGSASPGTSTPES | | CCAACTTCTACTGAAGAAGGTTCTAC | |
| | GSASPGSEPATSGSE | | CAGCTCTACCGCAGAATCTCCTGGTCC | |
| | TPGTSESATPESGPG | | AGGTACCTCTACTCCGGAAAGCGGCT | |
| | SPAGSPTSTEEGTSTE | | CTGCATCTCCAGGTTCTACTAGCGAAT | |
| | PSEGSAPGTSESATP | | CTCCTTCTGGCACTGCACCAGGTTCTA | |
| | ESGPGTSTEPSEGSA | | CTAGCGAATCCCCGTCTGGTACTGCTC | |
| | PGTSTEPSEGSAPGSP | | CAGGTACTTCTACTCCTGAAAGCGGTT | |
| | AGSPTSTEEGTSTEPS | | CCGCTTCTCCAGGTACCTCTACTCCGG | |
| | EGSAPGTSTEPSEGS | | AAAGCGGTTCTGCATCTCCAGGTAGC | |
| | APGTSESATPESGPG | | GAACCGGCAACCTCCGGCTCTGAAAC | |
| | TSESATPESGPGTSTE | | CCCAGGTACCTCTGAAAGCGCTACTC | |
| | PSEGSAPGTSTEPSE | | CTGAATCCGGCCCAGGTAGCCCGGCA | |
| | GSAPGTSESATPESG | | GGTTCTCCGACTTCCACTGAGGAAGG | |
| | PGTSTEPSEGSAPGS | | TACCTCTACTGAACCTTCTGAGGGCA | |
| | EPATSGSETPGSPAG | | GCGCTCCAGGTACTTCTGAAAGCGCT | |
| | SPTSTEEGSSTPSGAT | | ACCCCGGAGTCCGGTCCAGGTACTTC | |
| | GSPGTPGSGTASSSP | | TACTGAACCGTCCGAAGGTAGCGCAC | |
| | GSSTPSGATGSPGTS | | CAGGTACTTCTACCGAACCGTCCGAG | |
| | TEPSEGSAPGTSTEPS | | GGTAGCGCACCAGGTAGCCCAGCAGG | |
| | EGSAPGSEPATSGSE | | TTCTCCTACCTCCACCGAGGAAGGTA | |
| | TPGSPAGSPTSTEEG | | CTTCTACCGAACCGTCCGAGGGTAGC | |
| | SPAGSPTSTEEGTSTE | | GCACCAGGTACTTCTACCGAACCTTCC | |
| | PSEGSAPGASASGAP | | GAGGGCAGCGCACCAGGTACTTCTGA | |
| | STGGTSESATPESGP | | AAGCGCTACCCCTGAGTCCGGCCCAG | |
| | GSPAGSPTSTEEGSP | | GTACTTCTGAAAGCGCTACTCCTGAAT | |
| | AGSPTSTEEGSTSST | | CCGGTCCAGGTACCTCTACTGAACCTT | |
| | AESPGPGSTSESPSGT | | CCGAAGGCAGCGCTCCAGGTACCTCT | |
| | APGTSPSGESSTAPG | | ACCGAACCGTCCGAGGGCAGCGCACC | |
| | TPGSGTASSSPGSSTP | | AGGTACTTCTGAAAGCGCAACCCCTG | |
| | SGATGSPGSSPSAST | | AATCCGGTCCAGGTACTTCTACTGAA | |
| | GTGPGSEPATSGSET | | CCTTCCGAAGGTAGCGCTCCAGGTAG | |
| | PGTSESATPESGPGS | | CGAACCTGCTACTTCTGGTTCTGAAAC | |
| | EPATSGSETPGSTSST | | CCCAGGTAGCCCGGCTGGCTCTCCGA | |
| | AESPGPGSTSSTAESP | | CCTCCACCGAGGAAGGTAGCTCTACC | |
| | GPGTSPSGESSTAPG | | CCGTCTGGTGCTACTGGTTCTCCAGGT | |
| | SEPATSGSETPGSEP | | ACTCCGGGCAGCGGTACTGCTTCTTCC | |
| | ATSGSETPGTSTEPSE | | TCTCCAGGTAGCTCTACCCCTTCTGGT | |
| | GSAPGSTSSTAESPG | | GCTACTGGCTCTCCAGGTACCTCTACC | |
| | PGTSTPESGSASPGST | | GAACCGTCCGAGGGTAGCGCACCAGG | |
| | SESPSGTAPGTSTEPS | | TACCTCTACTGAACCGTCTGAGGGTA | |
| | EGSAPGTSTEPSEGS | | GCGCTCCAGGTAGCGAACCGGCAACC | |
| | APGTSTEPSEGSAPG | | TCCGGTTCTGAAACTCCAGGTAGCCCT | |
| | SSTPSGATGSPGSSPS | | GCTGGCTCTCCGACTTCTACTGAGGA | |
| | ASTGTGPGASPGTSS | | AGGTAGCCCGGCTGGTTCTCCGACTTC | |
| | TGSPGSEPATSGSET | | TACTGAGGAAGGTACTTCTACCGAAC | |
| | PGTSESATPESGPGSP | | CTTCCGAAGGTAGCGCTCCAGGTGCA | |
| | AGSPTSTEEGSSTPS | | AGCGCAAGCGGCGCGCCAAGCACGG | |
| | GATGSPGSSPSASTG | | GAGGTACTTCTGAAAGCGCTACTCCT | |
| | TGPGASPGTSSTGSP | | GAGTCCGGCCCAGGTAGCCCGGCTGG | |
| | GTSESATPESGPGTS | | CTCTCCGACTTCCACCGAGGAAGGTA | |
| | TEPSEGSAPGTSTEPS | | GCCCGGCTGGCTCTCCAACTTCTACTG | |
| | EGSAPGFPTIPLSRLF | | AAGAAGGTTCTACCAGCTCTACCGCT | |
| | DNAMLRAHRLHQL | | GAATCTCCTGGCCCAGGTTCTACTAGC | |
| | AFDTYQEFEEAYIPK | | GAATCTCCGTCTGGCACCGCACCAGG | |
| | EQKYSFLQNPQTSLC | | TACTTCCCCTAGCGGTGAATCTTCTAC | |
| | FSESIPTPSNREETQQ | | TGCACCAGGTACCCCTGGCAGCGGTA | |
| | KSNLELLRISLLLIQS | | CCGCTTCTTCCTCTCCAGGTAGCTCTA | |
| | WLEPVQFLRSVFAN | | CCCCGTCTGGTGCTACTGGCTCTCCAG | |
| | SLVYGASDSNVYDL | | GTTCTAGCCCGTCTGCATCTACCGGTA | |
| | LKDLEEGIQTLMGRL | | CCGGCCCAGGTAGCGAACCGGCAACC | |
| | EDGSPRTGQIFKQTY | | TCCGGCTCTGAAACTCCAGGTACTTCT | |
| | SKFDTNSHNDDALL | | GAAAGCGCTACTCCGGAATCCGGCCC | |
| | KNYGLLYCFRKDMD | | AGGTAGCGAACCGGCTACTTCCGGCT | |
| | KVETFLRIVQCRSVE | | CTGAAACCCCAGGTTCCACCAGCTCT | |
| | GSCGFGGTSESATPE | | ACTGCAGAATCTCCGGGCCCAGGTTC | |
| | SGPGSEPATSGSETP | | TACTAGCTCTACTGCAGAATCTCCGG | |
| | GTSESATPESGPGSE | | GTCCAGGTACTTCTCCTAGCGGCGAA | |
| | PATSGSETPGTSESA | | TCTTCTACCGCTCCAGGTAGCGAACC | |
| | TPESGPGTSTEPSEGS | | GGCAACCTCTGGCTCTGAAACTCCAG | |
| | APGSPAGSPTSTEEG | | GTAGCGAACCTGCAACCTCCGGCTCT | |
| | TSESATPESGPGSEP | | GAAACCCCAGGTACTTCTACTGAACC | |
| | ATSGSETPGTSESAT | | TTCTGAGGGCAGCGCACCAGGTTCTA | |
| | PESGPGSPAGSPTSTE | | CCAGCTCTACCGCAGAATCTCCTGGTC | |
| | EGSPAGSPTSTEEGT | | CAGGTACCTCTACTCCGGAAAGCGGC | |
| | STEPSEGSAPGTSES | | TCTGCATCTCCAGGTTCTACTAGCGAA | |
| | ATPESGPGTSESATP | | TCTCCTTCTGGCACTGCACCAGGTACT | |
| | ESGPGTSESATPESG | | TCTACCGAACCGTCCGAAGGCAGCGC | |
| | PGSEPATSGSETPGS | | TCCAGGTACCTCTACTGAACCTTCCGA | |
| | EPATSGSETPGSPAG | | GGGCAGCGCTCCAGGTACCTCTACCG | |
| | SPTSTEEGTSTEPSEG | | AACCTTCTGAAGGTAGCGCACCAGGT | |
| | SAPGTSTEPSEGSAP | | AGCTCTACTCCGTCTGGTGCAACCGG | |
| | GSEPATSGSETPGTS | | CTCCCCAGGTTCTAGCCCGTCTGCTTC | |
| | ESATPESGPGTSTEPS | | CACTGGTACTGGCCCAGGTGCTTCCCC | |
| | EGSAP | | GGGCACCAGCTCTACTGGTTCTCCAG | |
| | | | GTAGCGAACCTGCTACCTCCGGTTCTG | |
| | | | AAACCCCAGGTACCTCTGAAAGCGCA | |
| | | | ACTCCGGAGTCTGGTCCAGGTAGCCC | |
| | | | TGCAGGTTCTCCTACCTCCACTGAGGA | |
| | | | AGGTAGCTCTACTCCGTCTGGTGCAA | |
| | | | CCGGCTCCCCAGGTTCTAGCCCGTCTG | |
| | | | CTTCCACTGGTACTGGCCCAGGTGCTT | |
| | | | CCCCGGGCACCAGCTCTACTGGTTCTC | |
| | | | CAGGTACCTCTGAAAGCGCTACTCCG | |
| | | | GAGTCTGGCCCAGGTACCTCTACTGA | |
| | | | ACCGTCTGAGGGTAGCGCTCCAGGTA | |
| | | | CTTCTACTGAACCGTCCGAAGGTAGC | |
| | | | GCACCAGGTTTTCCGACTATTCCGCTG | |
| | | | TCTCGTCTGTTTGATAATGCTATGCTG | |
| | | | CGTGCGCACCGTCTGCACCAGCTGGC | |
| | | | CTTTGATACTTACCAGGAATTTGAAG | |
| | | | AAGCcTACATTCCTAAAGAGCAGAAG | |
| | | | TACTCTTTCCTGCAAAACCCACAGACT | |
| | | | TCTCTCTGCTTCAGCGAATCTATTCCG | |
| | | | ACGCCTTCCAATCGCGAGGAAACTCA | |
| | | | GCAAAAGTCCAATCTGGAACTACTCC | |
| | | | GCATTTCTCTGCTTCTGATTCAGAGCT | |
| | | | GGCTAGAACCAGTGCAATTTCTGCGT | |
| | | | TCCGTCTTCGCCAATAGCCTAGTTTAT | |
| | | | GGCGCATCCGACAGCAACGTATACGA | |
| | | | TCTCCTGAAAGATCTCGAGGAAGGCA | |
| | | | TTCAGACCCTGATGGGTCGTCTCGAG | |
| | | | GATGGCTCTCCGCGTACTGGTCAGAT | |
| | | | CTTCAAGCAGACTTACTCTAAATTTGA | |
| | | | TACTAACAGCCACAATGACGATGCGC | |
| | | | TTCTAAAAAACTATGGTCTGCTGTATT | |
| | | | GTTTTCGTAAAGATATGGACAAAGTT | |
| | | | GAAACCTTCCTGCGTATTGTTCAGTGT | |
| | | | CGTTCCGTTGAGGGCAGCTGTGGTTTC | |
| | | | TAAGGTGGTACCTCTGAAAGCGCAAC | |
| | | | TCCTGAGTCTGGCCCAGGTAGCGAAC | |
| | | | CTGCTACCTCCGGCTCTGAGACTCCAG | |
| | | | GTACCTCTGAAAGCGCAACCCCGGAA | |
| | | | TCTGGTCCAGGTAGCGAACCTGCAAC | |
| | | | CTCTGGCTCTGAAACCCCAGGTACCTC | |
| | | | TGAAAGCGCTACTCCTGAATCTGGCC | |
| | | | CAGGTACTTCTACTGAACCGTCCGAG | |
| | | | GGCAGCGCACCAGGTAGCCCTGCTGG | |
| | | | CTCTCCAACCTCCACCGAAGAAGGTA | |
| | | | CCTCTGAAAGCGCAACCCCTGAATCC | |
| | | | GGCCCAGGTAGCGAACCGGCAACCTC | |
| | | | CGGTTCTGAAACCCCAGGTACTTCTG | |
| | | | AAAGCGCTACTCCTGAGTCCGGCCCA | |
| | | | GGTAGCCCGGCTGGCTCTCCGACTTCC | |
| | | | ACCGAGGAAGGTAGCCCGGCTGGCTC | |
| | | | TCCAACTTCTACTGAAGAAGGTACTTC | |
| | | | TACCGAACCTTCCGAGGGCAGCGCAC | |
| | | | CAGGTACTTCTGAAAGCGCTACCCCT | |
| | | | GAGTCCGGCCCAGGTACTTCTGAAAG | |
| | | | CGCTACTCCTGAATCCGGTCCAGGTA | |
| | | | CTTCTGAAAGCGCTACCCCGGAATCT | |
| | | | GGCCCAGGTAGCGAACCGGCTACTTC | |
| | | | TGGTTCTGAAACCCCAGGTAGCGAAC | |
| | | | CGGCTACCTCCGGTTCTGAAACTCCA | |
| | | | GGTAGCCCAGCAGGCTCTCCGACTTC | |
| | | | CACTGAGGAAGGTACTTCTACTGAAC | |
| | | | CTTCCGAAGGCAGCGCACCAGGTACC | |
| | | | TCTACTGAACCTTCTGAGGGCAGCGC | |
| | | | TCCAGGTAGCGAACCTGCAACCTCTG | |
| | | | GCTCTGAAACCCCAGGTACCTCTGAA | |
| | | | AGCGCTACTCCTGAATCTGGCCCAGG | |
| | | | TACTTCTACTGAACCGTCCGAGGGCA | |
| | | | GCGCACCA | |
| AM1318- | GTSTEPSEGSAPGSE | 795 | GGTACTTCTACTGAACCGTCTGAAGG | 796 |
| hGH- | PATSGSETPGSPAGS | | CAGCGCACCAGGTAGCGAACCGGCTA | |
| AE288 | PTSTEEGSTSSTAESP | | CTTCCGGTTCTGAAACCCCAGGTAGC | |
| | GPGTSTPESGSASPG | | CCAGCAGGTTCTCCAACTTCTACTGAA | |
| | STSESPSGTAPGSTSE | | GAAGGTTCTACCAGCTCTACCGCAGA | |
| | SPSGTAPGTSTPESGS | | ATCTCCTGGTCCAGGTACCTCTACTCC | |
| | ASPGTSTPESGSASP | | GGAAAGCGGCTCTGCATCTCCAGGTT | |
| | GSEPATSGSETPGTS | | CTACTAGCGAATCTCCTTCTGGCACTG | |
| | ESATPESGPGSPAGS | | CACCAGGTTCTACTAGCGAATCCCCG | |
| | PTSTEEGTSTEPSEGS | | TCTGGTACTGCTCCAGGTACTTCTACT | |
| | APGTSESATPESGPG | | CCTGAAAGCGGTTCCGCTTCTCCAGGT | |
| | TSTEPSEGSAPGTSTE | | ACCTCTACTCCGGAAAGCGGTTCTGC | |
| | PSEGSAPGSPAGSPT | | ATCTCCAGGTAGCGAACCGGCAACCT | |
| | STEEGTSTEPSEGSAP | | CCGGCTCTGAAACCCCAGGTACCTCT | |
| | GTSTEPSEGSAPGTS | | GAAAGCGCTACTCCTGAATCCGGCCC | |
| | ESATPESGPGTSESA | | AGGTAGCCCGGCAGGTTCTCCGACTT | |
| | TPESGPGTSTEPSEGS | | CCACTGAGGAAGGTACCTCTACTGAA | |
| | APGTSTEPSEGSAPG | | CCTTCTGAGGGCAGCGCTCCAGGTAC | |
| | TSESATPESGPGTSTE | | TTCTGAAAGCGCTACCCCGGAGTCCG | |
| | PSEGSAPGSEPATSG | | GTCCAGGTACTTCTACTGAACCGTCCG | |
| | SETPGSPAGSPTSTEE | | AAGGTAGCGCACCAGGTACTTCTACC | |
| | GSSTPSGATGSPGTP | | GAACCGTCCGAGGGTAGCGCACCAGG | |
| | GSGTASSSPGSSTPS | | TAGCCCAGCAGGTTCTCCTACCTCCAC | |
| | GATGSPGTSTEPSEG | | CGAGGAAGGTACTTCTACCGAACCGT | |
| | SAPGTSTEPSEGSAP | | CCGAGGGTAGCGCACCAGGTACTTCT | |
| | GSEPATSGSETPGSP | | ACCGAACCTTCCGAGGGCAGCGCACC | |
| | AGSPTSTEEGSPAGS | | AGGTACTTCTGAAAGCGCTACCCCTG | |
| | PTSTEEGTSTEPSEGS | | AGTCCGGCCCAGGTACTTCTGAAAGC | |
| | APGPEPTGPAPSGGS | | GCTACTCCTGAATCCGGTCCAGGTAC | |
| | EPATSGSETPGTSES | | CTCTACTGAACCTTCCGAAGGCAGCG | |
| | ATPESGPGSPAGSPT | | CTCCAGGTACCTCTACCGAACCGTCC | |
| | STEEGTSESATPESGP | | GAGGGCAGCGCACCAGGTACTTCTGA | |
| | GSPAGSPTSTEEGSP | | AAGCGCAACCCCTGAATCCGGTCCAG | |
| | AGSPTSTEEGTSESA | | GTACTTCTACTGAACCTTCCGAAGGTA | |
| | TPESGPGSPAGSPTST | | GCGCTCCAGGTAGCGAACCTGCTACT | |
| | EEGSPAGSPTSTEEG | | TCTGGTTCTGAAACCCCAGGTAGCCC | |
| | STSSTAESPGPGSTSE | | GGCTGGCTCTCCGACCTCCACCGAGG | |
| | SPSGTAPGTSPSGESS | | AAGGTAGCTCTACCCCGTCTGGTGCT | |
| | TAPGSTSESPSGTAP | | ACTGGTTCTCCAGGTACTCCGGGCAG | |
| | GSTSESPSGTAPGTSP | | CGGTACTGCTTCTTCCTCTCCAGGTAG | |
| | SGESSTAPGTSTEPSE | | CTCTACCCCTTCTGGTGCTACTGGCTC | |
| | GSAPGTSESATPESG | | TCCAGGTACCTCTACCGAACCGTCCG | |
| | PGTSESATPESGPGS | | AGGGTAGCGCACCAGGTACCTCTACT | |
| | EPATSGSETPGTSES | | GAACCGTCTGAGGGTAGCGCTCCAGG | |
| | ATPESGPGTSESATP | | TAGCGAACCGGCAACCTCCGGTTCTG | |
| | ESGPGTSTEPSEGSA | | AAACTCCAGGTAGCCCTGCTGGCTCT | |
| | PGTSESATPESGPGT | | CCGACTTCTACTGAGGAAGGTAGCCC | |
| | STEPSEGSAPGTSPSG | | GGCTGGTTCTCCGACTTCTACTGAGGA | |
| | ESSTAPGTSPSGESST | | AGGTACTTCTACCGAACCTTCCGAAG | |
| | APGTSPSGESSTAPG | | GTAGCGCTCCAGGTCCAGAACCAACG | |
| | TSTEPSEGSAPGSPA | | GGGCCGGCCCCAAGCGGAGGTAGCGA | |
| | GSPTSTEEGTSTEPSE | | ACCGGCAACCTCCGGCTCTGAAACCC | |
| | GSAPGSSPSASTGTG | | CAGGTACCTCTGAAAGCGCTACTCCT | |
| | PGSSTPSGATGSPGS | | GAATCCGGCCCAGGTAGCCCGGCAGG | |
| | STPSGATGSPGSSTPS | | TTCTCCGACTTCCACTGAGGAAGGTA | |
| | GATGSPGSSTPSGAT | | CTTCTGAAAGCGCTACTCCTGAGTCCG | |
| | GSPGASPGTSSTGSP | | GCCCAGGTAGCCCGGCTGGCTCTCCG | |
| | GASASGAPSTGGTSP | | ACTTCCACCGAGGAAGGTAGCCCGGC | |
| | SGESSTAPGSTSSTA | | TGGCTCTCCAACTTCTACTGAAGAAG | |
| | ESPGPGTSPSGESSTA | | GTACTTCTGAAAGCGCTACTCCTGAGT | |
| | PGTSESATPESGPGT | | CCGGCCCAGGTAGCCCGGCTGGCTCT | |
| | STEPSEGSAPGTSTEP | | CCGACTTCCACCGAGGAAGGTAGCCC | |
| | SEGSAPGSSPSASTG | | GGCTGGCTCTCCAACTTCTACTGAAG | |
| | TGPGSSTPSGATGSP | | AAGGTTCTACCAGCTCTACCGCTGAA | |
| | GASPGTSSTGSPGTS | | TCTCCTGGCCCAGGTTCTACTAGCGAA | |
| | TPESGSASPGTSPSGE | | TCTCCGTCTGGCACCGCACCAGGTACT | |
| | SSTAPGTSPSGESSTA | | TCCCCTAGCGGTGAATCTTCTACTGCA | |
| | PGTSESATPESGPGS | | CCAGGTTCTACCAGCGAATCTCCTTCT | |
| | EPATSGSETPGTSTEP | | GGCACCGCTCCAGGTTCTACTAGCGA | |
| | SEGSAPGSTSESPSGT | | ATCCCCGTCTGGTACCGCACCAGGTA | |
| | APGSTSESPSGTAPG | | CTTCTCCTAGCGGCGAATCTTCTACCG | |
| | TSTPESGSASPGSPA | | CACCAGGTACTTCTACCGAACCTTCCG | |
| | GSPTSTEEGTSESATP | | AGGGCAGCGCACCAGGTACTTCTGAA | |
| | ESGPGTSTEPSEGSA | | AGCGCTACCCCTGAGTCCGGCCCAGG | |
| | PGSPAGSPTSTEEGT | | TACTTCTGAAAGCGCTACTCCTGAATC | |
| | SESATPESGPGSEPA | | CGGTCCAGGTAGCGAACCGGCAACCT | |
| | TSGSETPGSSTPSGA | | CTGGCTCTGAAACCCCAGGTACCTCT | |
| | TGSPGASPGTSSTGS | | GAAAGCGCTACTCCGGAATCTGGTCC | |
| | PGSSTPSGATGSPGS | | AGGTACTTCTGAAAGCGCTACTCCGG | |
| | TSESPSGTAPGTSPSG | | AATCCGGTCCAGGTACCTCTACTGAA | |
| | ESSTAPGSTSSTAESP | | CCTTCTGAGGGCAGCGCTCCAGGTAC | |
| | GPGSSTPSGATGSPG | | TTCTGAAAGCGCTACCCCGGAGTCCG | |
| | ASPGTSSTGSPGTPG | | GTCCAGGTACTTCTACTGAACCGTCCG | |
| | SGTASSSPGSPAGSP | | AAGGTAGCGCACCAGGTACCTCCCCT | |
| | TSTEEGSPAGSPTSTE | | AGCGGCGAATCTTCTACTGCTCCAGG | |
| | EGTSTEPSEGSAPGF | | TACCTCTCCTAGCGGCGAATCTTCTAC | |
| | PTIPLSRLFDNAMLR | | CGCTCCAGGTACCTCCCCTAGCGGTG | |
| | AHRLHQLAFDTYQE | | AATCTTCTACCGCACCAGGTACTTCTA | |
| | FEEAYIPKEQKYSFL | | CCGAACCGTCCGAGGGTAGCGCACCA | |
| | QNPQTSLCFSESIPTP | | GGTAGCCCAGCAGGTTCTCCTACCTCC | |
| | SNREETQQKSNLELL | | ACCGAGGAAGGTACTTCTACCGAACC | |
| | RISLLLIQSWLEPVQF | | GTCCGAGGGTAGCGCACCAGGTTCTA | |
| | LRSVFANSLVYGAS | | GCCCTTCTGCTTCCACCGGTACCGGCC | |
| | DSNVYDLLKDLEEGI | | CAGGTAGCTCTACTCCGTCTGGTGCA | |
| | QTLMGRLEDGSPRT | | ACTGGCTCTCCAGGTAGCTCTACTCCG | |
| | GQIFKQTYSKFDTNS | | TCTGGTGCAACCGGCTCCCCAGGTAG | |
| | HNDDALLKNYGLLY | | CTCTACCCCGTCTGGTGCTACCGGCTC | |
| | CFRKDMDKVETFLRI | | TCCAGGTAGCTCTACCCCGTCTGGTGC | |
| | VQCRSVEGSCGFGG | | AACCGGCTCCCCAGGTGCATCCCCGG | |
| | TSESATPESGPGSEP | | GTACTAGCTCTACCGGTTCTCCAGGTG | |
| | ATSGSETPGTSESAT | | CAAGCGCAAGCGGCGCGCCAAGCACG | |
| | PESGPGSEPATSGSE | | GGAGGTACTTCTCCGAGCGGTGAATC | |
| | TPGTSESATPESGPG | | TTCTACCGCACCAGGTTCTACTAGCTC | |
| | TSTEPSEGSAPGSPA | | TACCGCTGAATCTCCGGGCCCAGGTA | |
| | GSPTSTEEGTSESATP | | CTTCTCCGAGCGGTGAATCTTCTACTG | |
| | ESGPGSEPATSGSET | | CTCCAGGTACCTCTGAAAGCGCTACT | |
| | PGTSESATPESGPGSP | | CCGGAGTCTGGCCCAGGTACCTCTAC | |
| | AGSPTSTEEGSPAGS | | TGAACCGTCTGAGGGTAGCGCTCCAG | |
| | PTSTEEGTSTEPSEGS | | GTACTTCTACTGAACCGTCCGAAGGT | |
| | APGTSESATPESGPG | | AGCGCACCAGGTTCTAGCCCTTCTGC | |
| | TSESATPESGPGTSES | | ATCTACTGGTACTGGCCCAGGTAGCT | |
| | ATPESGPGSEPATSG | | CTACTCCTTCTGGTGCTACCGGCTCTC | |
| | SETPGSEPATSGSETP | | CAGGTGCTTCTCCGGGTACTAGCTCTA | |
| | GSPAGSPTSTEEGTS | | CCGGTTCTCCAGGTACTTCTACTCCGG | |
| | TEPSEGSAPGTSTEPS | | AAAGCGGTTCCGCATCTCCAGGTACT | |
| | EGSAPGSEPATSGSE | | TCTCCTAGCGGTGAATCTTCTACTGCT | |
| | TPGTSESATPESGPG | | CCAGGTACCTCTCCTAGCGGCGAATC | |
| | TSTEPSEGSAP | | TTCTACTGCTCCAGGTACTTCTGAAAG | |
| | | | CGCAACCCCTGAATCCGGTCCAGGTA | |
| | | | GCGAACCGGCTACTTCTGGCTCTGAG | |
| | | | ACTCCAGGTACTTCTACCGAACCGTCC | |
| | | | GAAGGTAGCGCACCAGGTTCTACCAG | |
| | | | CGAATCCCCTTCTGGTACTGCTCCAGG | |
| | | | TTCTACCAGCGAATCCCCTTCTGGCAC | |
| | | | CGCACCAGGTACTTCTACCCCTGAAA | |
| | | | GCGGCTCCGCTTCTCCAGGTAGCCCG | |
| | | | GCAGGCTCTCCGACCTCTACTGAGGA | |
| | | | AGGTACTTCTGAAAGCGCAACCCCGG | |
| | | | AGTCCGGCCCAGGTACCTCTACCGAA | |
| | | | CCGTCTGAGGGCAGCGCACCAGGTAG | |
| | | | CCCTGCTGGCTCTCCAACCTCCACCGA | |
| | | | AGAAGGTACCTCTGAAAGCGCAACCC | |
| | | | CTGAATCCGGCCCAGGTAGCGAACCG | |
| | | | GCAACCTCCGGTTCTGAAACCCCAGG | |
| | | | TAGCTCTACCCCGTCTGGTGCTACCGG | |
| | | | TTCCCCAGGTGCTTCTCCTGGTACTAG | |
| | | | CTCTACCGGTTCTCCAGGTAGCTCTAC | |
| | | | CCCGTCTGGTGCTACTGGCTCTCCAGG | |
| | | | TTCTACTAGCGAATCCCCGTCTGGTAC | |
| | | | TGCTCCAGGTACTTCCCCTAGCGGTGA | |
| | | | ATCTTCTACTGCTCCAGGTTCTACCAG | |
| | | | CTCTACCGCAGAATCTCCGGGTCCAG | |
| | | | GTAGCTCTACCCCTTCTGGTGCAACCG | |
| | | | GCTCTCCAGGTGCATCCCCGGGTACC | |
| | | | AGCTCTACCGGTTCTCCAGGTACTCCG | |
| | | | GGTAGCGGTACCGCTTCTTCCTCTCCA | |
| | | | GGTAGCCCTGCTGGCTCTCCGACTTCT | |
| | | | ACTGAGGAAGGTAGCCCGGCTGGTTC | |
| | | | TCCGACTTCTACTGAGGAAGGTACTTC | |
| | | | TACCGAACCTTCCGAAGGTAGCGCTC | |
| | | | CAGGTTTTCCGACTATTCCGCTGTCTC | |
| | | | GTCTGTTTGATAATGCTATGCTGCGTG | |
| | | | CGCACCGTCTGCACCAGCTGGCCTTTG | |
| | | | ATACTTACCAGGAATTTGAAGAAGCcT | |
| | | | ACATTCCTAAAGAGCAGAAGTACTCT | |
| | | | TTCCTGCAAAACCCACAGACTTCTCTC | |
| | | | TGCTTCAGCGAATCTATTCCGACGCCT | |
| | | | TCCAATCGCGAGGAAACTCAGCAAAA | |
| | | | GTCCAATCTGGAACTACTCCGCATTTC | |
| | | | TCTGCTTCTGATTCAGAGCTGGCTAGA | |
| | | | ACCAGTGCAATTTCTGCGTTCCGTCTT | |
| | | | CGCCAATAGCCTAGTTTATGGCGCAT | |
| | | | CCGACAGCAACGTATACGATCTCCTG | |
| | | | AAAGATCTCGAGGAAGGCATTCAGAC | |
| | | | CCTGATGGGTCGTCTCGAGGATGGCT | |
| | | | CTCCGCGTACTGGTCAGATCTTCAAGC | |
| | | | AGACTTACTCTAAATTTGATACTAACA | |
| | | | GCCACAATGACGATGCGCTTCTAAAA | |
| | | | AACTATGGTCTGCTGTATTGTTTTCGT | |
| | | | AAAGATATGGACAAAGTTGAAACCTT | |
| | | | CCTGCGTATTGTTCAGTGTCGTTCCGT | |
| | | | TGAGGGCAGCTGTGGTTTCTAAGGTG | |
| | | | GTACCTCTGAAAGCGCAACTCCTGAG | |
| | | | TCTGGCCCAGGTAGCGAACCTGCTAC | |
| | | | CTCCGGCTCTGAGACTCCAGGTACCTC | |
| | | | TGAAAGCGCAACCCCGGAATCTGGTC | |
| | | | CAGGTAGCGAACCTGCAACCTCTGGC | |
| | | | TCTGAAACCCCAGGTACCTCTGAAAG | |
| | | | CGCTACTCCTGAATCTGGCCCAGGTA | |
| | | | CTTCTACTGAACCGTCCGAGGGCAGC | |
| | | | GCACCAGGTAGCCCTGCTGGCTCTCC | |
| | | | AACCTCCACCGAAGAAGGTACCTCTG | |
| | | | AAAGCGCAACCCCTGAATCCGGCCCA | |
| | | | GGTAGCGAACCGGCAACCTCCGGTTC | |
| | | | TGAAACCCCAGGTACTTCTGAAAGCG | |
| | | | CTACTCCTGAGTCCGGCCCAGGTAGC | |
| | | | CCGGCTGGCTCTCCGACTTCCACCGA | |
| | | | GGAAGGTAGCCCGGCTGGCTCTCCAA | |
| | | | CTTCTACTGAAGAAGGTACTTCTACCG | |
| | | | AACCTTCCGAGGGCAGCGCACCAGGT | |
| | | | ACTTCTGAAAGCGCTACCCCTGAGTC | |
| | | | CGGCCCAGGTACTTCTGAAAGCGCTA | |
| | | | CTCCTGAATCCGGTCCAGGTACTTCTG | |
| | | | AAAGCGCTACCCCGGAATCTGGCCCA | |
| | | | GGTAGCGAACCGGCTACTTCTGGTTCT | |
| | | | GAAACCCCAGGTAGCGAACCGGCTAC | |
| | | | CTCCGGTTCTGAAACTCCAGGTAGCC | |
| | | | CAGCAGGCTCTCCGACTTCCACTGAG | |
| | | | GAAGGTACTTCTACTGAACCTTCCGA | |
| | | | AGGCAGCGCACCAGGTACCTCTACTG | |
| | | | AACCTTCTGAGGGCAGCGCTCCAGGT | |
| | | | AGCGAACCTGCAACCTCTGGCTCTGA | |
| | | | AACCCCAGGTACCTCTGAAAGCGCTA | |
| | | | CTCCTGAATCTGGCCCAGGTACTTCTA | |
| | | | CTGAACCGTCCGAGGGCAGCGCACCA | |

*Sequence name reflects N- to C-terminus configuration of the growth factor and XTEN components

TABLE 37
Exemplary GHXTEN comprising growth hormones, XTEN and cleavage sequences

| GHXTEN | | SEQ ID | | |
|---|---|---|---|---|
| Name* | Amino Acid Sequence | NO: | DNA Nucleotide Sequence | SEQ ID NO: |
| AE912- | MAEPAGSPTSTEEGT | 797 | ATGGCTGAACCTGCTGGCTCTCCAACCT | 798 |
| hGH- | PGSGTASSSPGSSTPS | | CCACTGAGGAAGGTACCCCGGGTAGCG | |
| Thrombin- | GATGSPGASPGTSST | | GTACTGCTTCTTCCTCTCCAGGTAGCTCT | |
| AE144 | GSPGSPAGSPTSTEE | | ACCCCTTCTGGTGCAACCGGCTCTCCAG | |
| | GTSESATPESGPGTS | | GTGCTTCTCCGGGCACCAGCTCTACCGG | |
| | TEPSEGSAPGSPAGS | | TTCTCCAGGTAGCCCGGCTGGCTCTCCT | |
| | PTSTEEGTSTEPSEGS | | ACCTCTACTGAGGAAGGTACTTCTGAAA | |
| | APGTSTEPSEGSAPG | | GCGCTACTCCTGAGTCTGGTCCAGGTAC | |
| | TSESATPESGPGSEP | | CTCTACTGAACCGTCCGAAGGTAGCGCT | |
| | ATSGSETPGSEPATS | | CCAGGTAGCCCAGCAGGCTCTCCGACTT | |
| | GSETPGSPAGSPTST | | CCACTGAGGAAGGTACTTCTACTGAACC | |
| | EEGTSESATPESGPG | | TTCCGAAGGCAGCGCACCAGGTACCTCT | |
| | TSTEPSEGSAPGTSTE | | ACTGAACCTTCTGAGGGCAGCGCTCCAG | |
| | PSEGSAPGSPAGSPT | | GTACTTCTGAAAGCGCTACCCCGGAATC | |
| | STEEGTSTEPSEGSAP | | TGGCCCAGGTAGCGAACCGGCTACTTCT | |
| | GTSTEPSEGSAPGTS | | GGTTCTGAAACCCCAGGTAGCGAACCG | |
| | ESATPESGPGTSTEPS | | GCTACCTCCGGTTCTGAAACTCCAGGTA | |
| | EGSAPGTSESATPES | | GCCCGGCAGGCTCTCCGACCTCTACTGA | |
| | GPGSEPATSGSETPG | | GGAAGGTACTTCTGAAAGCGCAACCCC | |
| | TSTEPSEGSAPGTSTE | | GGAGTCCGGCCCAGGTACCTCTACCGA | |
| | PSEGSAPGTSESATP | | ACCGTCTGAGGGCAGCGCACCAGGTAC | |
| | ESGPGTSESATPESG | | TTCTACCGAACCGTCCGAGGGTAGCGCA | |
| | PGSPAGSPTSTEEGT | | CCAGGTAGCCCAGCAGGTTCTCCTACCT | |
| | SESATPESGPGSEPA | | CCACCGAGGAAGGTACTTCTACCGAAC | |
| | TSGSETPGTSESATPE | | CGTCCGAGGGTAGCGCACCAGGTACCT | |
| | SGPGTSTEPSEGSAP | | CTACTGAACCTTCTGAGGGCAGCGCTCC | |
| | GTSTEPSEGSAPGTS | | AGGTACTTCTGAAAGCGCTACCCCGGA | |
| | TEPSEGSAPGTSTEPS | | GTCCGGTCCAGGTACTTCTACTGAACCG | |
| | EGSAPGTSTEPSEGS | | TCCGAAGGTAGCGCACCAGGTACTTCTG | |
| | APGTSTEPSEGSAPG | | AAAGCGCAACCCCTGAATCCGGTCCAG | |
| | SPAGSPTSTEEGTSTE | | GTAGCGAACCGGCTACTTCTGGCTCTGA | |
| | PSEGSAPGTSESATP | | GACTCCAGGTACTTCTACCGAACCGTCC | |
| | ESGPGSEPATSGSET | | GAAGGTAGCGCACCAGGTACTTCTACTG | |
| | PGTSESATPESGPGS | | AACCGTCTGAAGGTAGCGCACCAGGTA | |
| | EPATSGSETPGTSES | | CTTCTGAAAGCGCAACCCCGGAATCCG | |
| | ATPESGPGTSTEPSE | | GCCCAGGTACCTCTGAAAGCGCAACCC | |
| | GSAPGTSESATPESG | | CGGAGTCCGGCCCAGGTAGCCCTGCTG | |
| | PGSPAGSPTSTEEGSP | | GCTCTCCAACCTCCACCGAAGAAGGTAC | |
| | AGSPTSTEEGSPAGS | | CTCTGAAAGCGCAACCCCTGAATCCGGC | |
| | PTSTEEGTSESATPES | | CCAGGTAGCGAACCGGCAACCTCCGGT | |
| | GPGTSTEPSEGSAPG | | TCTGAAACCCCAGGTACCTCTGAAAGCG | |
| | TSESATPESGPGSEP | | CTACTCCGGAGTCTGGCCCAGGTACCTC | |
| | ATSGSETPGTSESAT | | TACTGAACCGTCTGAGGGTAGCGCTCCA | |
| | PESGPGSEPATSGSE | | GGTACTTCTACTGAACCGTCCGAAGGTA | |
| | TPGTSESATPESGPG | | GCGCACCAGGTACTTCTACCGAACCGTC | |
| | TSTEPSEGSAPGSPA | | CGAAGGCAGCGCTCCAGGTACCTCTACT | |
| | GSPTSTEEGTSESATP | | GAACCTTCCGAGGGCAGCGCTCCAGGT | |
| | ESGPGSEPATSGSET | | ACCTCTACCGAACCTTCTGAAGGTAGCG | |
| | PGTSESATPESGPGSP | | CACCAGGTACTTCTACCGAACCGTCCGA | |
| | AGSPTSTEEGSPAGS | | GGGTAGCGCACCAGGTAGCCCAGCAGG | |
| | PTSTEEGTSTEPSEGS | | TTCTCCTACCTCCACCGAGGAAGGTACT | |
| | APGTSESATPESGPG | | TCTACCGAACCGTCCGAGGGTAGCGCA | |
| | TSESATPESGPGTSES | | CCAGGTACCTCTGAAAGCGCAACTCCTG | |
| | ATPESGPGSEPATSG | | AGTCTGGCCCAGGTAGCGAACCTGCTAC | |
| | SETPGSEPATSGSETP | | CTCCGGCTCTGAGACTCCAGGTACCTCT | |
| | GSPAGSPTSTEEGTS | | GAAAGCGCAACCCCGGAATCTGGTCCA | |
| | TEPSEGSAPGTSTEPS | | GGTAGCGAACCTGCAACCTCTGGCTCTG | |
| | EGSAPGSEPATSGSE | | AAACCCCAGGTACCTCTGAAAGCGCTA | |
| | TPGTSESATPESGPG | | CTCCTGAATCTGGCCCAGGTACTTCTAC | |
| | TSTEPSEGSAPGFPTI | | TGAACCGTCCGAGGGCAGCGCACCAGG | |
| | PLSRLFDNAMLRAH | | TACTTCTGAAAGCGCTACTCCTGAGTCC | |
| | RLHQLAFDTYQEFEE | | GGCCCAGGTAGCCCGGCTGGCTCTCCGA | |
| | AYIPKEQKYSFLQNP | | CTTCCACCGAGGAAGGTAGCCCGGCTG | |
| | QTSLCFSESIPTPSNR | | GCTCTCCAACTTCTACTGAAGAAGGTAG | |
| | EETQQKSNLELLRIS | | CCCGGCAGGCTCTCCGACCTCTACTGAG | |
| | LLLIQSWLEPVQFLR | | GAAGGTACTTCTGAAAGCGCAACCCCG | |
| | SVFANSLVYGASDS | | GAGTCCGGCCCAGGTACCTCTACCGAAC | |
| | NVYDLLKDLEEGIQT | | CGTCTGAGGGCAGCGCACCAGGTACCT | |
| | LMGRLEDGSPRTGQI | | CTGAAAGCGCAACTCCTGAGTCTGGCCC | |
| | FKQTYSKFDTNSHN | | AGGTAGCGAACCTGCTACCTCCGGCTCT | |
| | DDALLKNYGLLYCF | | GAGACTCCAGGTACCTCTGAAAGCGCA | |
| | RKDMDKVETFLRIV | | ACCCCGGAATCTGGTCCAGGTAGCGAA | |
| | QCRSVEGSCGFGLTP | | CCTGCAACCTCTGGCTCTGAAACCCCAG | |
| | RSLLVGGGGSEPATS | | GTACCTCTGAAAGCGCTACTCCTGAATC | |
| | GSETPGTSESATPES | | TGGCCCAGGTACTTCTACTGAACCGTCC | |
| | GPGSEPATSGSETPG | | GAGGGCAGCGCACCAGGTAGCCCTGCT | |
| | SPAGSPTSTEEGTSTE | | GGCTCTCCAACCTCCACCGAAGAAGGT | |
| | PSEGSAPGSEPATSG | | ACCTCTGAAAGCGCAACCCCTGAATCCG | |
| | SETPGSEPATSGSETP | | GCCCAGGTAGCGAACCGGCAACCTCCG | |
| | GSEPATSGSETPGTS | | GTTCTGAAACCCCAGGTACTTCTGAAAG | |
| | TEPSEGSAPGTSESA | | CGCTACTCCTGAGTCCGGCCCAGGTAGC | |
| | TPESGPGSEPATSGS | | CCGGCTGGCTCTCCGACTTCCACCGAGG | |
| | ETPGTSTEPSEGSAP | | AAGGTAGCCCGGCTGGCTCTCCAACTTC | |
| | | | TACTGAAGAAGGTACTTCTACCGAACCT | |
| | | | TCCGAGGGCAGCGCACCAGGTACTTCTG | |
| | | | AAAGCGCTACCCCTGAGTCCGGCCCAG | |
| | | | GTACTTCTGAAAGCGCTACTCCTGAATC | |
| | | | CGGTCCAGGTACTTCTGAAAGCGCTACC | |
| | | | CCGGAATCTGGCCCAGGTAGCGAACCG | |
| | | | GCTACTTCTGGTTCTGAAACCCCAGGTA | |
| | | | GCGAACCGGCTACCTCCGGTTCTGAAAC | |
| | | | TCCAGGTAGCCCAGCAGGCTCTCCGACT | |
| | | | TCCACTGAGGAAGGTACTTCTACTGAAC | |
| | | | CTTCCGAAGGCAGCGCACCAGGTACCTC | |
| | | | TACTGAACCTTCTGAGGGCAGCGCTCCA | |
| | | | GGTAGCGAACCTGCAACCTCTGGCTCTG | |
| | | | AAACCCCAGGTACCTCTGAAAGCGCTA | |
| | | | CTCCTGAATCTGGCCCAGGTACTTCTAC | |
| | | | TGAACCGTCCGAGGGCAGCGCACCAGG | |
| | | | TTTTCCGACTATTCCGCTGTCTCGTCTGT | |
| | | | TTGATAATGCTATGCTGCGTGCGCACCG | |
| | | | TCTGCACCAGCTGGCCTTTGATACTTAC | |
| | | | CAGGAATTTGAAGAAGCcTACATTCCTA | |
| | | | AAGAGCAGAAGTACTCTTTCCTGCAAA | |
| | | | ACCCACAGACTTCTCTCTGCTTCAGCGA | |
| | | | ATCTATTCCGACGCCTTCCAATCGCGAG | |
| | | | GAAACTCAGCAAAAGTCCAATCTGGAA | |
| | | | CTACTCCGCATTTCTCTGCTTCTGATTCA | |
| | | | GAGCTGGCTAGAACCAGTGCAATTTCTG | |
| | | | CGTTCCGTCTTCGCCAATAGCCTAGTTT | |
| | | | ATGGCGCATCCGACAGCAACGTATACG | |
| | | | ATCTCCTGAAAGATCTCGAGGAAGGCA | |
| | | | TTCAGACCCTGATGGGTCGTCTCGAGGA | |
| | | | TGGCTCTCCGCGTACTGGTCAGATCTTC | |
| | | | AAGCAGACTTACTCTAAATTTGATACTA | |
| | | | ACAGCCACAATGACGATGCGCTTCTAA | |
| | | | AAAACTATGGTCTGCTGTATTGTTTTCG | |
| | | | TAAAGATATGGACAAAGTTGAAACCTT | |
| | | | CCTGCGTATTGTTCAGTGTCGTTCCGTT | |
| | | | GAGGGCAGCTGTGGTTTCTAAGGTctgacc | |
| | | | ccgcgcagcctgctggtgggcggcGGTGGTAGCGAA | |
| | | | CCGGCAACTTCCGGCTCTGAAACCCCAG | |
| | | | GTACTTCTGAAAGCGCTACTCCTGAGTC | |
| | | | TGGCCCAGGTAGCGAACCTGCTACCTCT | |
| | | | GGCTCTGAAACCCCAGGTAGCCCGGCA | |
| | | | GGCTCTCCGACTTCCACCGAGGAAGGTA | |
| | | | CCTCTACTGAACCTTCTGAGGGTAGCGC | |
| | | | TCCAGGTAGCGAACCGGCAACCTCTGG | |
| | | | CTCTGAAACCCCAGGTAGCGAACCTGCT | |
| | | | ACCTCCGGCTCTGAAACTCCAGGTAGCG | |
| | | | AACCGGCTACTTCCGGTTCTGAAACTCC | |
| | | | AGGTACCTCTACCGAACCTTCCGAAGGC | |
| | | | AGCGCACCAGGTACTTCTGAAAGCGCA | |
| | | | ACCCCTGAATCCGGTCCAGGTAGCGAA | |
| | | | CCGGCTACTTCTGGCTCTGAGACTCCAG | |
| | | | GTACTTCTACCGAACCGTCCGAAGGTAG | |
| | | | CGCACCA | |
| AE912- | MAEPAGSPTSTEEGT | 799 | ATGGCTGAACCTGCTGGCTCTCCAACCT | 800 |
| hGH- | PGSGTASSSPGSSTPS | | CCACTGAGGAAGGTACCCCGGGTAGCG | |
| FXIa- | GATGSPGASPGTSST | | GTACTGCTTCTTCCTCTCCAGGTAGCTCT | |
| AE144 | GSPGSPAGSPTSTEE | | ACCCCTTCTGGTGCAACCGGCTCTCCAG | |
| | GTSESATPESGPGTS | | GTGCTTCTCCGGGCACCAGCTCTACCGG | |
| | TEPSEGSAPGSPAGS | | TTCTCCAGGTAGCCCGGCTGGCTCTCCT | |
| | PTSTEEGTSTEPSEGS | | ACCTCTACTGAGGAAGGTACTTCTGAAA | |
| | APGTSTEPSEGSAPG | | GCGCTACTCCTGAGTCTGGTCCAGGTAC | |
| | TSESATPESGPGSEP | | CTCTACTGAACCGTCCGAAGGTAGCGCT | |
| | ATSGSETPGSEPATS | | CCAGGTAGCCCAGCAGGCTCTCCGACTT | |
| | GSETPGSPAGSPTST | | CCACTGAGGAAGGTACTTCTACTGAACC | |
| | EEGTSESATPESGPG | | TTCCGAAGGCAGCGCACCAGGTACCTCT | |
| | TSTEPSEGSAPGTSTE | | ACTGAACCTTCTGAGGGCAGCGCTCCAG | |
| | PSEGSAPGSPAGSPT | | GTACTTCTGAAAGCGCTACCCCGGAATC | |
| | STEEGTSTEPSEGSAP | | TGGCCCAGGTAGCGAACCGGCTACTTCT | |
| | GTSTEPSEGSAPGTS | | GGTTCTGAAACCCCAGGTAGCGAACCG | |
| | ESATPESGPGTSTEPS | | GCTACCTCCGGTTCTGAAACTCCAGGTA | |
| | EGSAPGTSESATPES | | GCCCGGCAGGCTCTCCGACCTCTACTGA | |
| | GPGSEPATSGSETPG | | GGAAGGTACTTCTGAAAGCGCAACCCC | |
| | TSTEPSEGSAPGTSTE | | GGAGTCCGGCCCAGGTACCTCTACCGA | |
| | PSEGSAPGTSESATP | | ACCGTCTGAGGGCAGCGCACCAGGTAC | |
| | ESGPGTSESATPESG | | TTCTACCGAACCGTCCGAGGGTAGCGCA | |
| | PGSPAGSPTSTEEGT | | CCAGGTAGCCCAGCAGGTTCTCCTACCT | |
| | SESATPESGPGSEPA | | CCACCGAGGAAGGTACTTCTACCGAAC | |
| | TSGSETPGTSESATPE | | CGTCCGAGGGTAGCGCACCAGGTACCT | |
| | SGPGTSTEPSEGSAP | | CTACTGAACCTTCTGAGGGCAGCGCTCC | |
| | GTSTEPSEGSAPGTS | | AGGTACTTCTGAAAGCGCTACCCCGGA | |
| | TEPSEGSAPGTSTEPS | | GTCCGGTCCAGGTACTTCTACTGAACCG | |
| | EGSAPGTSTEPSEGS | | TCCGAAGGTAGCGCACCAGGTACTTCTG | |
| | APGTSTEPSEGSAPG | | AAAGCGCAACCCCTGAATCCGGTCCAG | |
| | SPAGSPTSTEEGTSTE | | GTAGCGAACCGGCTACTTCTGGCTCTGA | |
| | PSEGSAPGTSESATP | | GACTCCAGGTACTTCTACCGAACCGTCC | |
| | ESGPGSEPATSGSET | | GAAGGTAGCGCACCAGGTACTTCTACTG | |
| | PGTSESATPESGPGS | | AACCGTCTGAAGGTAGCGCACCAGGTA | |
| | EPATSGSETPGTSES | | CTTCTGAAAGCGCAACCCCGGAATCCG | |
| | ATPESGPGTSTEPSE | | GCCCAGGTACCTCTGAAAGCGCAACCC | |
| | GSAPGTSESATPESG | | CGGAGTCCGGCCCAGGTAGCCCTGCTG | |
| | PGSPAGSPTSTEEGSP | | GCTCTCCAACCTCCACCGAAGAAGGTAC | |
| | AGSPTSTEEGSPAGS | | CTCTGAAAGCGCAACCCCTGAATCCGGC | |
| | PTSTEEGTSESATPES | | CCAGGTAGCGAACCGGCAACCTCCGGT | |
| | GPGTSTEPSEGSAPG | | TCTGAAACCCCAGGTACCTCTGAAAGCG | |
| | TSESATPESGPGSEP | | CTACTCCGGAGTCTGGCCCAGGTACCTC | |
| | ATSGSETPGTSESAT | | TACTGAACCGTCTGAGGGTAGCGCTCCA | |
| | PESGPGSEPATSGSE | | GGTACTTCTACTGAACCGTCCGAAGGTA | |
| | TPGTSESATPESGPG | | GCGCACCAGGTACTTCTACCGAACCGTC | |
| | TSTEPSEGSAPGSPA | | CGAAGGCAGCGCTCCAGGTACCTCTACT | |
| | GSPTSTEEGTSESATP | | GAACCTTCCGAGGGCAGCGCTCCAGGT | |
| | ESGPGSEPATSGSET | | ACCTCTACCGAACCTTCTGAAGGTAGCG | |
| | PGTSESATPESGPGSP | | CACCAGGTACTTCTACCGAACCGTCCGA | |
| | AGSPTSTEEGSPAGS | | GGGTAGCGCACCAGGTAGCCCAGCAGG | |
| | PTSTEEGTSTEPSEGS | | TTCTCCTACCTCCACCGAGGAAGGTACT | |
| | APGTSESATPESGPG | | TCTACCGAACCGTCCGAGGGTAGCGCA | |
| | TSESATPESGPGTSES | | CCAGGTACCTCTGAAAGCGCAACTCCTG | |
| | ATPESGPGSEPATSG | | AGTCTGGCCCAGGTAGCGAACCTGCTAC | |
| | SETPGSEPATSGSETP | | CTCCGGCTCTGAGACTCCAGGTACCTCT | |
| | GSPAGSPTSTEEGTS | | GAAAGCGCAACCCCGGAATCTGGTCCA | |
| | TEPSEGSAPGTSTEPS | | GGTAGCGAACCTGCAACCTCTGGCTCTG | |
| | EGSAPGSEPATSGSE | | AAACCCCAGGTACCTCTGAAAGCGCTA | |
| | TPGTSESATPESGPG | | CTCCTGAATCTGGCCCAGGTACTTCTAC | |
| | TSTEPSEGSAPGFPTI | | TGAACCGTCCGAGGGCAGCGCACCAGG | |
| | PLSRLFDNAMLRAH | | TACTTCTGAAAGCGCTACTCCTGAGTCC | |
| | RLHQLAFDTYQEFEE | | GGCCCAGGTAGCCCGGCTGGCTCTCCGA | |
| | AYIPKEQKYSFLQNP | | CTTCCACCGAGGAAGGTAGCCCGGCTG | |
| | QTSLCFSESIPTPSNR | | GCTCTCCAACTTCTACTGAAGAAGGTAG | |
| | EETQQKSNLELLRIS | | CCCGGCAGGCTCTCCGACCTCTACTGAG | |
| | LLLIQSWLEPVQFLR | | GAAGGTACTTCTGAAAGCGCAACCCCG | |
| | SVFANSLVYGASDS | | GAGTCCGGCCCAGGTACCTCTACCGAAC | |
| | NVYDLLKDLEEGIQT | | CGTCTGAGGGCAGCGCACCAGGTACCT | |
| | LMGRLEDGSPRTGQI | | CTGAAAGCGCAACTCCTGAGTCTGGCCC | |
| | FKQTYSKFDTNSHN | | AGGTAGCGAACCTGCTACCTCCGGCTCT | |
| | DDALLKNYGLLYCF | | GAGACTCCAGGTACCTCTGAAAGCGCA | |
| | RKDMDKVETFLRIV | | ACCCCGGAATCTGGTCCAGGTAGCGAA | |
| | QCRSVEGSCGFGGG | | CCTGCAACCTCTGGCTCTGAAACCCCAG | |
| | KLTRVVGGGGSEPA | | GTACCTCTGAAAGCGCTACTCCTGAATC | |
| | TSGSETPGTSESATPE | | TGGCCCAGGTACTTCTACTGAACCGTCC | |
| | SGPGSEPATSGSETP | | GAGGGCAGCGCACCAGGTAGCCCTGCT | |
| | GSPAGSPTSTEEGTS | | GGCTCTCCAACCTCCACCGAAGAAGGT | |
| | TEPSEGSAPGSEPAT | | ACCTCTGAAAGCGCAACCCCTGAATCCG | |
| | SGSETPGSEPATSGS | | GCCCAGGTAGCGAACCGGCAACCTCCG | |
| | ETPGSEPATSGSETP | | GTTCTGAAACCCCAGGTACTTCTGAAAG | |
| | GTSTEPSEGSAPGTS | | CGCTACTCCTGAGTCCGGCCCAGGTAGC | |
| | ESATPESGPGSEPAT | | CCGGCTGGCTCTCCGACTTCCACCGAGG | |
| | SGSETPGTSTEPSEGS | | AAGGTAGCCCGGCTGGCTCTCCAACTTC | |
| | AP | | TACTGAAGAAGGTACTTCTACCGAACCT | |
| | | | TCCGAGGGCAGCGCACCAGGTACTTCTG | |
| | | | AAAGCGCTACCCCTGAGTCCGGCCCAG | |
| | | | GTACTTCTGAAAGCGCTACTCCTGAATC | |
| | | | CGGTCCAGGTACTTCTGAAAGCGCTACC | |
| | | | CCGGAATCTGGCCCAGGTAGCGAACCG | |
| | | | GCTACTTCTGGTTCTGAAACCCCAGGTA | |
| | | | GCGAACCGGCTACCTCCGGTTCTGAAAC | |
| | | | TCCAGGTAGCCCAGCAGGCTCTCCGACT | |
| | | | TCCACTGAGGAAGGTACTTCTACTGAAC | |
| | | | CTTCCGAAGGCAGCGCACCAGGTACCTC | |
| | | | TACTGAACCTTCTGAGGGCAGCGCTCCA | |
| | | | GGTAGCGAACCTGCAACCTCTGGCTCTG | |
| | | | AAACCCCAGGTACCTCTGAAAGCGCTA | |
| | | | CTCCTGAATCTGGCCCAGGTACTTCTAC | |
| | | | TGAACCGTCCGAGGGCAGCGCACCAGG | |
| | | | TTTTCCGACTATTCCGCTGTCTCGTCTGT | |
| | | | TTGATAATGCTATGCTGCGTGCGCACCG | |
| | | | TCTGCACCAGCTGGCCTTTGATACTTAC | |
| | | | CAGGAATTTGAAGAAGCcTACATTCCTA | |
| | | | AAGAGCAGAAGTACTCTTTCCTGCAAA | |
| | | | ACCCACAGACTTCTCTCTGCTTCAGCGA | |
| | | | ATCTATTCCGACGCCTTCCAATCGCGAG | |
| | | | GAAACTCAGCAAAAGTCCAATCTGGAA | |
| | | | CTACTCCGCATTTCTCTGCTTCTGATTCA | |
| | | | GAGCTGGCTAGAACCAGTGCAATTTCTG | |
| | | | CGTTCCGTCTTCGCCAATAGCCTAGTTT | |
| | | | ATGGCGCATCCGACAGCAACGTATACG | |
| | | | ATCTCCTGAAAGATCTCGAGGAAGGCA | |
| | | | TTCAGACCCTGATGGGTCGTCTCGAGGA | |
| | | | TGGCTCTCCGCGTACTGGTCAGATCTTC | |
| | | | AAGCAGACTTACTCTAAATTTGATACTA | |
| | | | ACAGCCACAATGACGATGCGCTTCTAA | |
| | | | AAAACTATGGTCTGCTGTATTGTTTTCG | |
| | | | TAAAGATATGGACAAAGTTGAAACCTT | |
| | | | CCTGCGTATTGTTCAGTGTCGTTCCGTT | |
| | | | GAGGGCAGCTGTGGTTTCTAAGGTggcgg | |
| | | | caaactgacccgcgtggtgggcggcGGTGGTAGCGA | |
| | | | ACCGGCAACTTCCGGCTCTGAAACCCCA | |
| | | | GGTACTTCTGAAAGCGCTACTCCTGAGT | |
| | | | CTGGCCCAGGTAGCGAACCTGCTACCTC | |
| | | | TGGCTCTGAAACCCCAGGTAGCCCGGC | |
| | | | AGGCTCTCCGACTTCCACCGAGGAAGGT | |
| | | | ACCTCTACTGAACCTTCTGAGGGTAGCG | |
| | | | CTCCAGGTAGCGAACCGGCAACCTCTG | |
| | | | GCTCTGAAACCCCAGGTAGCGAACCTG | |
| | | | CTACCTCCGGCTCTGAAACTCCAGGTAG | |
| | | | CGAACCGGCTACTTCCGGTTCTGAAACT | |
| | | | CCAGGTACCTCTACCGAACCTTCCGAAG | |
| | | | GCAGCGCACCAGGTACTTCTGAAAGCG | |
| | | | CAACCCCTGAATCCGGTCCAGGTAGCG | |
| | | | AACCGGCTACTTCTGGCTCTGAGACTCC | |
| | | | AGGTACTTCTACCGAACCGTCCGAAGGT | |
| | | | AGCGCACCA | |
| AE912- | MAEPAGSPTSTEEGT | 801 | ATGGCTGAACCTGCTGGCTCTCCAACCT | 802 |
| hGH- | PGSGTASSSPGSSTPS | | CCACTGAGGAAGGTACCCCGGGTAGCG | |
| Elastase- | GATGSPGASPGTSST | | GTACTGCTTCTTCCTCTCCAGGTAGCTCT | |
| AE144 | GSPGSPAGSPTSTEE | | ACCCCTTCTGGTGCAACCGGCTCTCCAG | |
| | GTSESATPESGPGTS | | GTGCTTCTCCGGGCACCAGCTCTACCGG | |
| | TEPSEGSAPGSPAGS | | TTCTCCAGGTAGCCCGGCTGGCTCTCCT | |
| | PTSTEEGTSTEPSEGS | | ACCTCTACTGAGGAAGGTACTTCTGAAA | |
| | APGTSTEPSEGSAPG | | GCGCTACTCCTGAGTCTGGTCCAGGTAC | |
| | TSESATPESGPGSEP | | CTCTACTGAACCGTCCGAAGGTAGCGCT | |
| | ATSGSETPGSEPATS | | CCAGGTAGCCCAGCAGGCTCTCCGACTT | |
| | GSETPGSPAGSPTST | | CCACTGAGGAAGGTACTTCTACTGAACC | |
| | EEGTSESATPESGPG | | TTCCGAAGGCAGCGCACCAGGTACCTCT | |
| | TSTEPSEGSAPGTSTE | | ACTGAACCTTCTGAGGGCAGCGCTCCAG | |
| | PSEGSAPGSPAGSPT | | GTACTTCTGAAAGCGCTACCCCGGAATC | |
| | STEEGTSTEPSEGSAP | | TGGCCCAGGTAGCGAACCGGCTACTTCT | |
| | GTSTEPSEGSAPGTS | | GGTTCTGAAACCCCAGGTAGCGAACCG | |
| | ESATPESGPGTSTEPS | | GCTACCTCCGGTTCTGAAACTCCAGGTA | |
| | EGSAPGTSESATPES | | GCCCGGCAGGCTCTCCGACCTCTACTGA | |
| | GPGSEPATSGSETPG | | GGAAGGTACTTCTGAAAGCGCAACCCC | |
| | TSTEPSEGSAPGTSTE | | GGAGTCCGGCCCAGGTACCTCTACCGA | |
| | PSEGSAPGTSESATP | | ACCGTCTGAGGGCAGCGCACCAGGTAC | |
| | ESGPGTSESATPESG | | TTCTACCGAACCGTCCGAGGGTAGCGCA | |
| | PGSPAGSPTSTEEGT | | CCAGGTAGCCCAGCAGGTTCTCCTACCT | |
| | SESATPESGPGSEPA | | CCACCGAGGAAGGTACTTCTACCGAAC | |
| | TSGSETPGTSESATPE | | CGTCCGAGGGTAGCGCACCAGGTACCT | |
| | SGPGTSTEPSEGSAP | | CTACTGAACCTTCTGAGGGCAGCGCTCC | |
| | GTSTEPSEGSAPGTS | | AGGTACTTCTGAAAGCGCTACCCCGGA | |
| | TEPSEGSAPGTSTEPS | | GTCCGGTCCAGGTACTTCTACTGAACCG | |
| | EGSAPGTSTEPSEGS | | TCCGAAGGTAGCGCACCAGGTACTTCTG | |
| | APGTSTEPSEGSAPG | | AAAGCGCAACCCCTGAATCCGGTCCAG | |
| | SPAGSPTSTEEGTSTE | | GTAGCGAACCGGCTACTTCTGGCTCTGA | |
| | PSEGSAPGTSESATP | | GACTCCAGGTACTTCTACCGAACCGTCC | |
| | ESGPGSEPATSGSET | | GAAGGTAGCGCACCAGGTACTTCTACTG | |
| | PGTSESATPESGPGS | | AACCGTCTGAAGGTAGCGCACCAGGTA | |
| | EPATSGSETPGTSES | | CTTCTGAAAGCGCAACCCCGGAATCCG | |
| | ATPESGPGTSTEPSE | | GCCCAGGTACCTCTGAAAGCGCAACCC | |
| | GSAPGTSESATPESG | | CGGAGTCCGGCCCAGGTAGCCCTGCTG | |
| | PGSPAGSPTSTEEGSP | | GCTCTCCAACCTCCACCGAAGAAGGTAC | |
| | AGSPTSTEEGSPAGS | | CTCTGAAAGCGCAACCCCTGAATCCGGC | |
| | PTSTEEGTSESATPES | | CCAGGTAGCGAACCGGCAACCTCCGGT | |
| | GPGTSTEPSEGSAPG | | TCTGAAACCCCAGGTACCTCTGAAAGCG | |
| | TSESATPESGPGSEP | | CTACTCCGGAGTCTGGCCCAGGTACCTC | |
| | ATSGSETPGTSESAT | | TACTGAACCGTCTGAGGGTAGCGCTCCA | |
| | PESGPGSEPATSGSE | | GGTACTTCTACTGAACCGTCCGAAGGTA | |
| | TPGTSESATPESGPG | | GCGCACCAGGTACTTCTACCGAACCGTC | |
| | TSTEPSEGSAPGSPA | | CGAAGGCAGCGCTCCAGGTACCTCTACT | |
| | GSPTSTEEGTSESATP | | GAACCTTCCGAGGGCAGCGCTCCAGGT | |
| | ESGPGSEPATSGSET | | ACCTCTACCGAACCTTCTGAAGGTAGCG | |
| | PGTSESATPESGPGSP | | CACCAGGTACTTCTACCGAACCGTCCGA | |
| | AGSPTSTEEGSPAGS | | GGGTAGCGCACCAGGTAGCCCAGCAGG | |
| | PTSTEEGTSTEPSEGS | | TTCTCCTACCTCCACCGAGGAAGGTACT | |
| | APGTSESATPESGPG | | TCTACCGAACCGTCCGAGGGTAGCGCA | |
| | TSESATPESGPGTSES | | CCAGGTACCTCTGAAAGCGCAACTCCTG | |
| | ATPESGPGSEPATSG | | AGTCTGGCCCAGGTAGCGAACCTGCTAC | |
| | SETPGSEPATSGSETP | | CTCCGGCTCTGAGACTCCAGGTACCTCT | |
| | GSPAGSPTSTEEGTS | | GAAAGCGCAACCCCGGAATCTGGTCCA | |
| | TEPSEGSAPGTSTEPS | | GGTAGCGAACCTGCAACCTCTGGCTCTG | |
| | EGSAPGSEPATSGSE | | AAACCCCAGGTACCTCTGAAAGCGCTA | |
| | TPGTSESATPESGPG | | CTCCTGAATCTGGCCCAGGTACTTCTAC | |
| | TSTEPSEGSAPGFPTI | | TGAACCGTCCGAGGGCAGCGCACCAGG | |
| | PLSRLFDNAMLRAH | | TACTTCTGAAAGCGCTACTCCTGAGTCC | |
| | RLHQLAFDTYQEFEE | | GGCCCAGGTAGCCCGGCTGGCTCTCCGA | |
| | AYIPKEQKYSFLQNP | | CTTCCACCGAGGAAGGTAGCCCGGCTG | |
| | QTSLCFSESIPTPSNR | | GCTCTCCAACTTCTACTGAAGAAGGTAG | |
| | EETQQKSNLELLRIS | | CCCGGCAGGCTCTCCGACCTCTACTGAG | |
| | LLLIQSWLEPVQFLR | | GAAGGTACTTCTGAAAGCGCAACCCCG | |
| | SVFANSLVYGASDS | | GAGTCCGGCCCAGGTACCTCTACCGAAC | |
| | NVYDLLKDLEEGIQT | | CGTCTGAGGGCAGCGCACCAGGTACCT | |
| | LMGRLEDGSPRTGQI | | CTGAAAGCGCAACTCCTGAGTCTGGCCC | |
| | FKQTYSKFDTNSHN | | AGGTAGCGAACCTGCTACCTCCGGCTCT | |
| | DDALLKNYGLLYCF | | GAGACTCCAGGTACCTCTGAAAGCGCA | |
| | RKDMDKVETFLRIV | | ACCCCGGAATCTGGTCCAGGTAGCGAA | |
| | QCRSVEGSCGFGGG | | CCTGCAACCTCTGGCTCTGAAACCCCAG | |
| | LGPVSGVPGGSEPAT | | GTACCTCTGAAAGCGCTACTCCTGAATC | |
| | SGSETPGTSESATPES | | TGGCCCAGGTACTTCTACTGAACCGTCC | |
| | GPGSEPATSGSETPG | | GAGGGCAGCGCACCAGGTAGCCCTGCT | |
| | SPAGSPTSTEEGTSTE | | GGCTCTCCAACCTCCACCGAAGAAGGT | |
| | PSEGSAPGSEPATSG | | ACCTCTGAAAGCGCAACCCCTGAATCCG | |
| | SETPGSEPATSGSETP | | GCCCAGGTAGCGAACCGGCAACCTCCG | |
| | GSEPATSGSETPGTS | | GTTCTGAAACCCCAGGTACTTCTGAAAG | |
| | TEPSEGSAPGTSESA | | CGCTACTCCTGAGTCCGGCCCAGGTAGC | |
| | TPESGPGSEPATSGS | | CCGGCTGGCTCTCCGACTTCCACCGAGG | |
| | ETPGTSTEPSEGSAP | | AAGGTAGCCCGGCTGGCTCTCCAACTTC | |
| | | | TACTGAAGAAGGTACTTCTACCGAACCT | |
| | | | TCCGAGGGCAGCGCACCAGGTACTTCTG | |
| | | | AAAGCGCTACCCCTGAGTCCGGCCCAG | |
| | | | GTACTTCTGAAAGCGCTACTCCTGAATC | |
| | | | CGGTCCAGGTACTTCTGAAAGCGCTACC | |
| | | | CCGGAATCTGGCCCAGGTAGCGAACCG | |
| | | | GCTACTTCTGGTTCTGAAACCCCAGGTA | |
| | | | GCGAACCGGCTACCTCCGGTTCTGAAAC | |
| | | | TCCAGGTAGCCCAGCAGGCTCTCCGACT | |
| | | | TCCACTGAGGAAGGTACTTCTACTGAAC | |
| | | | CTTCCGAAGGCAGCGCACCAGGTACCTC | |
| | | | TACTGAACCTTCTGAGGGCAGCGCTCCA | |
| | | | GGTAGCGAACCTGCAACCTCTGGCTCTG | |
| | | | AAACCCCAGGTACCTCTGAAAGCGCTA | |
| | | | CTCCTGAATCTGGCCCAGGTACTTCTAC | |
| | | | TGAACCGTCCGAGGGCAGCGCACCAGG | |
| | | | TTTTCCGACTATTCCGCTGTCTCGTCTGT | |
| | | | TTGATAATGCTATGCTGCGTGCGCACCG | |
| | | | TCTGCACCAGCTGGCCTTTGATACTTAC | |
| | | | CAGGAATTTGAAGAAGCcTACATTCCTA | |
| | | | AAGAGCAGAAGTACTCTTTCCTGCAAA | |
| | | | ACCCACAGACTTCTCTCTGCTTCAGCGA | |
| | | | ATCTATTCCGACGCCTTCCAATCGCGAG | |
| | | | GAAACTCAGCAAAAGTCCAATCTGGAA | |
| | | | CTACTCCGCATTTCTCTGCTTCTGATTCA | |
| | | | GAGCTGGCTAGAACCAGTGCAATTTCTG | |
| | | | CGTTCCGTCTTCGCCAATAGCCTAGTTT | |
| | | | ATGGCGCATCCGACAGCAACGTATACG | |
| | | | ATCTCCTGAAAGATCTCGAGGAAGGCA | |
| | | | TTCAGACCCTGATGGGTCGTCTCGAGGA | |
| | | | TGGCTCTCCGCGTACTGGTCAGATCTTC | |
| | | | AAGCAGACTTACTCTAAATTTGATACTA | |
| | | | ACAGCCACAATGACGATGCGCTTCTAA | |
| | | | AAAACTATGGTCTGCTGTATTGTTTTCG | |
| | | | TAAAGATATGGACAAAGTTGAAACCTT | |
| | | | CCTGCGTATTGTTCAGTGTCGTTCCGTT | |
| | | | GAGGGCAGCTGTGGTTTCTAAGGTggcgg | |
| | | | cctgggcccggtgagcggcgtgccgGGTGGTAGCGA | |
| | | | ACCGGCAACTTCCGGCTCTGAAACCCCA | |
| | | | GGTACTTCTGAAAGCGCTACTCCTGAGT | |
| | | | CTGGCCCAGGTAGCGAACCTGCTACCTC | |
| | | | TGGCTCTGAAACCCCAGGTAGCCCGGC | |
| | | | AGGCTCTCCGACTTCCACCGAGGAAGGT | |
| | | | ACCTCTACTGAACCTTCTGAGGGTAGCG | |
| | | | CTCCAGGTAGCGAACCGGCAACCTCTG | |
| | | | GCTCTGAAACCCCAGGTAGCGAACCTG | |
| | | | CTACCTCCGGCTCTGAAACTCCAGGTAG | |
| | | | CGAACCGGCTACTTCCGGTTCTGAAACT | |
| | | | CCAGGTACCTCTACCGAACCTTCCGAAG | |
| | | | GCAGCGCACCAGGTACTTCTGAAAGCG | |
| | | | CAACCCCTGAATCCGGTCCAGGTAGCG | |
| | | | AACCGGCTACTTCTGGCTCTGAGACTCC | |
| | | | AGGTACTTCTACCGAACCGTCCGAAGGT | |
| | | | AGCGCACCA | |
| AE912- | MAEPAGSPTSTEEGT | 803 | ATGGCTGAACCTGCTGGCTCTCCAACCT | 804 |
| hGH- | PGSGTASSSPGSSTPS | | CCACTGAGGAAGGTACCCCGGGTAGCG | |
| MMP-17- | GATGSPGASPGTSST | | GTACTGCTTCTTCCTCTCCAGGTAGCTCT | |
| AE144 | GSPGSPAGSPTSTEE | | ACCCCTTCTGGTGCAACCGGCTCTCCAG | |
| | GTSESATPESGPGTS | | GTGCTTCTCCGGGCACCAGCTCTACCGG | |
| | TEPSEGSAPGSPAGS | | TTCTCCAGGTAGCCCGGCTGGCTCTCCT | |
| | PTSTEEGTSTEPSEGS | | ACCTCTACTGAGGAAGGTACTTCTGAAA | |
| | APGTSTEPSEGSAPG | | GCGCTACTCCTGAGTCTGGTCCAGGTAC | |
| | TSESATPESGPGSEP | | CTCTACTGAACCGTCCGAAGGTAGCGCT | |
| | ATSGSETPGSEPATS | | CCAGGTAGCCCAGCAGGCTCTCCGACTT | |
| | GSETPGSPAGSPTST | | CCACTGAGGAAGGTACTTCTACTGAACC | |
| | EEGTSESATPESGPG | | TTCCGAAGGCAGCGCACCAGGTACCTCT | |
| | TSTEPSEGSAPGTSTE | | ACTGAACCTTCTGAGGGCAGCGCTCCAG | |
| | PSEGSAPGSPAGSPT | | GTACTTCTGAAAGCGCTACCCCGGAATC | |
| | STEEGTSTEPSEGSAP | | TGGCCCAGGTAGCGAACCGGCTACTTCT | |
| | GTSTEPSEGSAPGTS | | GGTTCTGAAACCCCAGGTAGCGAACCG | |
| | ESATPESGPGTSTEPS | | GCTACCTCCGGTTCTGAAACTCCAGGTA | |
| | EGSAPGTSESATPES | | GCCCGGCAGGCTCTCCGACCTCTACTGA | |
| | GPGSEPATSGSETPG | | GGAAGGTACTTCTGAAAGCGCAACCCC | |
| | TSTEPSEGSAPGTSTE | | GGAGTCCGGCCCAGGTACCTCTACCGA | |
| | PSEGSAPGTSESATP | | ACCGTCTGAGGGCAGCGCACCAGGTAC | |
| | ESGPGTSESATPESG | | TTCTACCGAACCGTCCGAGGGTAGCGCA | |
| | PGSPAGSPTSTEEGT | | CCAGGTAGCCCAGCAGGTTCTCCTACCT | |
| | SESATPESGPGSEPA | | CCACCGAGGAAGGTACTTCTACCGAAC | |
| | TSGSETPGTSESATPE | | CGTCCGAGGGTAGCGCACCAGGTACCT | |
| | SGPGTSTEPSEGSAP | | CTACTGAACCTTCTGAGGGCAGCGCTCC | |
| | GTSTEPSEGSAPGTS | | AGGTACTTCTGAAAGCGCTACCCCGGA | |
| | TEPSEGSAPGTSTEPS | | GTCCGGTCCAGGTACTTCTACTGAACCG | |
| | EGSAPGTSTEPSEGS | | TCCGAAGGTAGCGCACCAGGTACTTCTG | |
| | APGTSTEPSEGSAPG | | AAAGCGCAACCCCTGAATCCGGTCCAG | |
| | SPAGSPTSTEEGTSTE | | GTAGCGAACCGGCTACTTCTGGCTCTGA | |
| | PSEGSAPGTSESATP | | GACTCCAGGTACTTCTACCGAACCGTCC | |
| | ESGPGSEPATSGSET | | GAAGGTAGCGCACCAGGTACTTCTACTG | |
| | PGTSESATPESGPGS | | AACCGTCTGAAGGTAGCGCACCAGGTA | |
| | EPATSGSETPGTSES | | CTTCTGAAAGCGCAACCCCGGAATCCG | |
| | ATPESGPGTSTEPSE | | GCCCAGGTACCTCTGAAAGCGCAACCC | |
| | GSAPGTSESATPESG | | CGGAGTCCGGCCCAGGTAGCCCTGCTG | |
| | PGSPAGSPTSTEEGSP | | GCTCTCCAACCTCCACCGAAGAAGGTAC | |
| | AGSPTSTEEGSPAGS | | CTCTGAAAGCGCAACCCCTGAATCCGGC | |
| | PTSTEEGTSESATPES | | CCAGGTAGCGAACCGGCAACCTCCGGT | |
| | GPGTSTEPSEGSAPG | | TCTGAAACCCCAGGTACCTCTGAAAGCG | |
| | TSESATPESGPGSEP | | CTACTCCGGAGTCTGGCCCAGGTACCTC | |
| | ATSGSETPGTSESAT | | TACTGAACCGTCTGAGGGTAGCGCTCCA | |
| | PESGPGSEPATSGSE | | GGTACTTCTACTGAACCGTCCGAAGGTA | |
| | TPGTSESATPESGPG | | GCGCACCAGGTACTTCTACCGAACCGTC | |
| | TSTEPSEGSAPGSPA | | CGAAGGCAGCGCTCCAGGTACCTCTACT | |
| | GSPTSTEEGTSESATP | | GAACCTTCCGAGGGCAGCGCTCCAGGT | |
| | ESGPGSEPATSGSET | | ACCTCTACCGAACCTTCTGAAGGTAGCG | |
| | PGTSESATPESGPGSP | | CACCAGGTACTTCTACCGAACCGTCCGA | |
| | AGSPTSTEEGSPAGS | | GGGTAGCGCACCAGGTAGCCCAGCAGG | |
| | PTSTEEGTSTEPSEGS | | TTCTCCTACCTCCACCGAGGAAGGTACT | |
| | APGTSESATPESGPG | | TCTACCGAACCGTCCGAGGGTAGCGCA | |
| | TSESATPESGPGTSES | | CCAGGTACCTCTGAAAGCGCAACTCCTG | |
| | ATPESGPGSEPATSG | | AGTCTGGCCCAGGTAGCGAACCTGCTAC | |
| | SETPGSEPATSGSETP | | CTCCGGCTCTGAGACTCCAGGTACCTCT | |
| | GSPAGSPTSTEEGTS | | GAAAGCGCAACCCCGGAATCTGGTCCA | |
| | TEPSEGSAPGTSTEPS | | GGTAGCGAACCTGCAACCTCTGGCTCTG | |
| | EGSAPGSEPATSGSE | | AAACCCCAGGTACCTCTGAAAGCGCTA | |
| | TPGTSESATPESGPG | | CTCCTGAATCTGGCCCAGGTACTTCTAC | |
| | TSTEPSEGSAPGFPTI | | TGAACCGTCCGAGGGCAGCGCACCAGG | |
| | PLSRLFDNAMLRAH | | TACTTCTGAAAGCGCTACTCCTGAGTCC | |
| | RLHQLAFDTYQEFEE | | GGCCCAGGTAGCCCGGCTGGCTCTCCGA | |
| | AYIPKEQKYSFLQNP | | CTTCCACCGAGGAAGGTAGCCCGGCTG | |
| | QTSLCFSESIPTPSNR | | GCTCTCCAACTTCTACTGAAGAAGGTAG | |
| | EETQQKSNLELLRIS | | CCCGGCAGGCTCTCCGACCTCTACTGAG | |
| | LLLIQSWLEPVQFLR | | GAAGGTACTTCTGAAAGCGCAACCCCG | |
| | SVFANSLVYGASDS | | GAGTCCGGCCCAGGTACCTCTACCGAAC | |
| | NVYDLLKDLEEGIQT | | CGTCTGAGGGCAGCGCACCAGGTACCT | |
| | LMGRLEDGSPRTGQI | | CTGAAAGCGCAACTCCTGAGTCTGGCCC | |
| | FKQTYSKFDTNSHN | | AGGTAGCGAACCTGCTACCTCCGGCTCT | |
| | DDALLKNYGLLYCF | | GAGACTCCAGGTACCTCTGAAAGCGCA | |
| | RKDMDKVETFLRIV | | ACCCCGGAATCTGGTCCAGGTAGCGAA | |
| | QCRSVEGSCGFGAPL | | CCTGCAACCTCTGGCTCTGAAACCCCAG | |
| | GLRLRGGGGSEPATS | | GTACCTCTGAAAGCGCTACTCCTGAATC | |
| | GSETPGTSESATPES | | TGGCCCAGGTACTTCTACTGAACCGTCC | |
| | GPGSEPATSGSETPG | | GAGGGCAGCGCACCAGGTAGCCCTGCT | |
| | SPAGSPTSTEEGTSTE | | GGCTCTCCAACCTCCACCGAAGAAGGT | |
| | PSEGSAPGSEPATSG | | ACCTCTGAAAGCGCAACCCCTGAATCCG | |
| | SETPGSEPATSGSETP | | GCCCAGGTAGCGAACCGGCAACCTCCG | |
| | GSEPATSGSETPGTS | | GTTCTGAAACCCCAGGTACTTCTGAAAG | |
| | TEPSEGSAPGTSESA | | CGCTACTCCTGAGTCCGGCCCAGGTAGC | |
| | TPESGPGSEPATSGS | | CCGGCTGGCTCTCCGACTTCCACCGAGG | |
| | ETPGTSTEPSEGSAP | | AAGGTAGCCCGGCTGGCTCTCCAACTTC | |
| | | | TACTGAAGAAGGTACTTCTACCGAACCT | |
| | | | TCCGAGGGCAGCGCACCAGGTACTTCTG | |
| | | | AAAGCGCTACCCCTGAGTCCGGCCCAG | |
| | | | GTACTTCTGAAAGCGCTACTCCTGAATC | |
| | | | CGGTCCAGGTACTTCTGAAAGCGCTACC | |
| | | | CCGGAATCTGGCCCAGGTAGCGAACCG | |
| | | | GCTACTTCTGGTTCTGAAACCCCAGGTA | |
| | | | GCGAACCGGCTACCTCCGGTTCTGAAAC | |
| | | | TCCAGGTAGCCCAGCAGGCTCTCCGACT | |
| | | | TCCACTGAGGAAGGTACTTCTACTGAAC | |
| | | | CTTCCGAAGGCAGCGCACCAGGTACCTC | |
| | | | TACTGAACCTTCTGAGGGCAGCGCTCCA | |
| | | | GGTAGCGAACCTGCAACCTCTGGCTCTG | |
| | | | AAACCCCAGGTACCTCTGAAAGCGCTA | |
| | | | CTCCTGAATCTGGCCCAGGTACTTCTAC | |
| | | | TGAACCGTCCGAGGGCAGCGCACCAGG | |
| | | | TTTTCCGACTATTCCGCTGTCTCGTCTGT | |
| | | | TTGATAATGCTATGCTGCGTGCGCACCG | |
| | | | TCTGCACCAGCTGGCCTTTGATACTTAC | |
| | | | CAGGAATTTGAAGAAGCcTACATTCCTA | |
| | | | AAGAGCAGAAGTACTCTTTCCTGCAAA | |
| | | | ACCCACAGACTTCTCTCTGCTTCAGCGA | |
| | | | ATCTATTCCGACGCCTTCCAATCGCGAG | |
| | | | GAAACTCAGCAAAAGTCCAATCTGGAA | |
| | | | CTACTCCGCATTTCTCTGCTTCTGATTCA | |
| | | | GAGCTGGCTAGAACCAGTGCAATTTCTG | |
| | | | CGTTCCGTCTTCGCCAATAGCCTAGTTT | |
| | | | ATGGCGCATCCGACAGCAACGTATACG | |
| | | | ATCTCCTGAAAGATCTCGAGGAAGGCA | |
| | | | TTCAGACCCTGATGGGTCGTCTCGAGGA | |
| | | | TGGCTCTCCGCGTACTGGTCAGATCTTC | |
| | | | AAGCAGACTTACTCTAAATTTGATACTA | |
| | | | ACAGCCACAATGACGATGCGCTTCTAA | |
| | | | AAAACTATGGTCTGCTGTATTGTTTTCG | |
| | | | TAAAGATATGGACAAAGTTGAAACCTT | |
| | | | CCTGCGTATTGTTCAGTGTCGTTCCGTT | |
| | | | GAGGGCAGCTGTGGTTTCTAAGGTgcgcc | |
| | | | gctgggcctgcgcctgcgcggcggcGGTGGTAGCGA | |
| | | | ACCGGCAACTTCCGGCTCTGAAACCCCA | |
| | | | GGTACTTCTGAAAGCGCTACTCCTGAGT | |
| | | | CTGGCCCAGGTAGCGAACCTGCTACCTC | |
| | | | TGGCTCTGAAACCCCAGGTAGCCCGGC | |
| | | | AGGCTCTCCGACTTCCACCGAGGAAGGT | |
| | | | ACCTCTACTGAACCTTCTGAGGGTAGCG | |
| | | | CTCCAGGTAGCGAACCGGCAACCTCTG | |
| | | | GCTCTGAAACCCCAGGTAGCGAACCTG | |
| | | | CTACCTCCGGCTCTGAAACTCCAGGTAG | |
| | | | CGAACCGGCTACTTCCGGTTCTGAAACT | |
| | | | CCAGGTACCTCTACCGAACCTTCCGAAG | |
| | | | GCAGCGCACCAGGTACTTCTGAAAGCG | |
| | | | CAACCCCTGAATCCGGTCCAGGTAGCG | |
| | | | AACCGGCTACTTCTGGCTCTGAGACTCC | |
| | | | AGGTACTTCTACCGAACCGTCCGAAGGT | |
| | | | AGCGCACCA | |
| AE912- | MAEPAGSPTSTEEGT | 805 | ATGGCTGAACCTGCTGGCTCTCCAACCT | 806 |
| hGH- | PGSGTASSSPGSSTPS | | CCACTGAGGAAGGTACCCCGGGTAGCG | |
| Thrombin- | GATGSPGASPGTSST | | GTACTGCTTCTTCCTCTCCAGGTAGCTCT | |
| AE288 | GSPGSPAGSPTSTEE | | ACCCCTTCTGGTGCAACCGGCTCTCCAG | |
| | GTSESATPESGPGTS | | GTGCTTCTCCGGGCACCAGCTCTACCGG | |
| | TEPSEGSAPGSPAGS | | TTCTCCAGGTAGCCCGGCTGGCTCTCCT | |
| | PTSTEEGTSTEPSEGS | | ACCTCTACTGAGGAAGGTACTTCTGAAA | |
| | APGTSTEPSEGSAPG | | GCGCTACTCCTGAGTCTGGTCCAGGTAC | |
| | TSESATPESGPGSEP | | CTCTACTGAACCGTCCGAAGGTAGCGCT | |
| | ATSGSETPGSEPATS | | CCAGGTAGCCCAGCAGGCTCTCCGACTT | |
| | GSETPGSPAGSPTST | | CCACTGAGGAAGGTACTTCTACTGAACC | |
| | EEGTSESATPESGPG | | TTCCGAAGGCAGCGCACCAGGTACCTCT | |
| | TSTEPSEGSAPGTSTE | | ACTGAACCTTCTGAGGGCAGCGCTCCAG | |
| | PSEGSAPGSPAGSPT | | GTACTTCTGAAAGCGCTACCCCGGAATC | |
| | STEEGTSTEPSEGSAP | | TGGCCCAGGTAGCGAACCGGCTACTTCT | |
| | GTSTEPSEGSAPGTS | | GGTTCTGAAACCCCAGGTAGCGAACCG | |
| | ESATPESGPGTSTEPS | | GCTACCTCCGGTTCTGAAACTCCAGGTA | |
| | EGSAPGTSESATPES | | GCCCGGCAGGCTCTCCGACCTCTACTGA | |
| | GPGSEPATSGSETPG | | GGAAGGTACTTCTGAAAGCGCAACCCC | |
| | TSTEPSEGSAPGTSTE | | GGAGTCCGGCCCAGGTACCTCTACCGA | |
| | PSEGSAPGTSESATP | | ACCGTCTGAGGGCAGCGCACCAGGTAC | |
| | ESGPGTSESATPESG | | TTCTACCGAACCGTCCGAGGGTAGCGCA | |
| | PGSPAGSPTSTEEGT | | CCAGGTAGCCCAGCAGGTTCTCCTACCT | |
| | SESATPESGPGSEPA | | CCACCGAGGAAGGTACTTCTACCGAAC | |
| | TSGSETPGTSESATPE | | CGTCCGAGGGTAGCGCACCAGGTACCT | |
| | SGPGTSTEPSEGSAP | | CTACTGAACCTTCTGAGGGCAGCGCTCC | |
| | GTSTEPSEGSAPGTS | | AGGTACTTCTGAAAGCGCTACCCCGGA | |
| | TEPSEGSAPGTSTEPS | | GTCCGGTCCAGGTACTTCTACTGAACCG | |
| | EGSAPGTSTEPSEGS | | TCCGAAGGTAGCGCACCAGGTACTTCTG | |
| | APGTSTEPSEGSAPG | | AAAGCGCAACCCCTGAATCCGGTCCAG | |
| | SPAGSPTSTEEGTSTE | | GTAGCGAACCGGCTACTTCTGGCTCTGA | |
| | PSEGSAPGTSESATP | | GACTCCAGGTACTTCTACCGAACCGTCC | |
| | ESGPGSEPATSGSET | | GAAGGTAGCGCACCAGGTACTTCTACTG | |
| | PGTSESATPESGPGS | | AACCGTCTGAAGGTAGCGCACCAGGTA | |
| | EPATSGSETPGTSES | | CTTCTGAAAGCGCAACCCCGGAATCCG | |
| | ATPESGPGTSTEPSE | | GCCCAGGTACCTCTGAAAGCGCAACCC | |
| | GSAPGTSESATPESG | | CGGAGTCCGGCCCAGGTAGCCCTGCTG | |
| | PGSPAGSPTSTEEGSP | | GCTCTCCAACCTCCACCGAAGAAGGTAC | |
| | AGSPTSTEEGSPAGS | | CTCTGAAAGCGCAACCCCTGAATCCGGC | |
| | PTSTEEGTSESATPES | | CCAGGTAGCGAACCGGCAACCTCCGGT | |
| | GPGTSTEPSEGSAPG | | TCTGAAACCCCAGGTACCTCTGAAAGCG | |
| | TSESATPESGPGSEP | | CTACTCCGGAGTCTGGCCCAGGTACCTC | |
| | ATSGSETPGTSESAT | | TACTGAACCGTCTGAGGGTAGCGCTCCA | |
| | PESGPGSEPATSGSE | | GGTACTTCTACTGAACCGTCCGAAGGTA | |
| | TPGTSESATPESGPG | | GCGCACCAGGTACTTCTACCGAACCGTC | |
| | TSTEPSEGSAPGSPA | | CGAAGGCAGCGCTCCAGGTACCTCTACT | |
| | GSPTSTEEGTSESATP | | GAACCTTCCGAGGGCAGCGCTCCAGGT | |
| | ESGPGSEPATSGSET | | ACCTCTACCGAACCTTCTGAAGGTAGCG | |
| | PGTSESATPESGPGSP | | CACCAGGTACTTCTACCGAACCGTCCGA | |
| | AGSPTSTEEGSPAGS | | GGGTAGCGCACCAGGTAGCCCAGCAGG | |
| | PTSTEEGTSTEPSEGS | | TTCTCCTACCTCCACCGAGGAAGGTACT | |
| | APGTSESATPESGPG | | TCTACCGAACCGTCCGAGGGTAGCGCA | |
| | TSESATPESGPGTSES | | CCAGGTACCTCTGAAAGCGCAACTCCTG | |
| | ATPESGPGSEPATSG | | AGTCTGGCCCAGGTAGCGAACCTGCTAC | |
| | SETPGSEPATSGSETP | | CTCCGGCTCTGAGACTCCAGGTACCTCT | |
| | GSPAGSPTSTEEGTS | | GAAAGCGCAACCCCGGAATCTGGTCCA | |
| | TEPSEGSAPGTSTEPS | | GGTAGCGAACCTGCAACCTCTGGCTCTG | |
| | EGSAPGSEPATSGSE | | AAACCCCAGGTACCTCTGAAAGCGCTA | |
| | TPGTSESATPESGPG | | CTCCTGAATCTGGCCCAGGTACTTCTAC | |
| | TSTEPSEGSAPGFPTI | | TGAACCGTCCGAGGGCAGCGCACCAGG | |
| | PLSRLFDNAMLRAH | | TACTTCTGAAAGCGCTACTCCTGAGTCC | |
| | RLHQLAFDTYQEFEE | | GGCCCAGGTAGCCCGGCTGGCTCTCCGA | |
| | AYIPKEQKYSFLQNP | | CTTCCACCGAGGAAGGTAGCCCGGCTG | |
| | QTSLCFSESIPTPSNR | | GCTCTCCAACTTCTACTGAAGAAGGTAG | |
| | EETQQKSNLELLRIS | | CCCGGCAGGCTCTCCGACCTCTACTGAG | |
| | LLLIQSWLEPVQFLR | | GAAGGTACTTCTGAAAGCGCAACCCCG | |
| | SVFANSLVYGASDS | | GAGTCCGGCCCAGGTACCTCTACCGAAC | |
| | NVYDLLKDLEEGIQT | | CGTCTGAGGGCAGCGCACCAGGTACCT | |
| | LMGRLEDGSPRTGQI | | CTGAAAGCGCAACTCCTGAGTCTGGCCC | |
| | FKQTYSKFDTNSHN | | AGGTAGCGAACCTGCTACCTCCGGCTCT | |
| | DDALLKNYGLLYCF | | GAGACTCCAGGTACCTCTGAAAGCGCA | |
| | RKDMDKVETFLRIV | | ACCCCGGAATCTGGTCCAGGTAGCGAA | |
| | QCRSVEGSCGFGLTP | | CCTGCAACCTCTGGCTCTGAAACCCCAG | |
| | RSLLVGGGGTSESAT | | GTACCTCTGAAAGCGCTACTCCTGAATC | |
| | PESGPGSEPATSGSE | | TGGCCCAGGTACTTCTACTGAACCGTCC | |
| | TPGTSESATPESGPG | | GAGGGCAGCGCACCAGGTAGCCCTGCT | |
| | SEPATSGSETPGTSES | | GGCTCTCCAACCTCCACCGAAGAAGGT | |
| | ATPESGPGTSTEPSE | | ACCTCTGAAAGCGCAACCCCTGAATCCG | |
| | GSAPGSPAGSPTSTE | | GCCCAGGTAGCGAACCGGCAACCTCCG | |
| | EGTSESATPESGPGS | | GTTCTGAAACCCCAGGTACTTCTGAAAG | |
| | EPATSGSETPGTSES | | CGCTACTCCTGAGTCCGGCCCAGGTAGC | |
| | ATPESGPGSPAGSPT | | CCGGCTGGCTCTCCGACTTCCACCGAGG | |
| | STEEGSPAGSPTSTEE | | AAGGTAGCCCGGCTGGCTCTCCAACTTC | |
| | GTSTEPSEGSAPGTS | | TACTGAAGAAGGTACTTCTACCGAACCT | |
| | ESATPESGPGTSESA | | TCCGAGGGCAGCGCACCAGGTACTTCTG | |
| | TPESGPGTSESATPES | | AAAGCGCTACCCCTGAGTCCGGCCCAG | |
| | GPGSEPATSGSETPG | | GTACTTCTGAAAGCGCTACTCCTGAATC | |
| | SEPATSGSETPGSPA | | CGGTCCAGGTACTTCTGAAAGCGCTACC | |
| | GSPTSTEEGTSTEPSE | | CCGGAATCTGGCCCAGGTAGCGAACCG | |
| | GSAPGTSTEPSEGSA | | GCTACTTCTGGTTCTGAAACCCCAGGTA | |
| | PGSEPATSGSETPGT | | GCGAACCGGCTACCTCCGGTTCTGAAAC | |
| | SESATPESGPGTSTEP | | TCCAGGTAGCCCAGCAGGCTCTCCGACT | |
| | SEGSAP | | TCCACTGAGGAAGGTACTTCTACTGAAC | |
| | | | CTTCCGAAGGCAGCGCACCAGGTACCTC | |
| | | | TACTGAACCTTCTGAGGGCAGCGCTCCA | |
| | | | GGTAGCGAACCTGCAACCTCTGGCTCTG | |
| | | | AAACCCCAGGTACCTCTGAAAGCGCTA | |
| | | | CTCCTGAATCTGGCCCAGGTACTTCTAC | |
| | | | TGAACCGTCCGAGGGCAGCGCACCAGG | |
| | | | TTTTCCGACTATTCCGCTGTCTCGTCTGT | |
| | | | TTGATAATGCTATGCTGCGTGCGCACCG | |
| | | | TCTGCACCAGCTGGCCTTTGATACTTAC | |
| | | | CAGGAATTTGAAGAAGCcTACATTCCTA | |
| | | | AAGAGCAGAAGTACTCTTTCCTGCAAA | |
| | | | ACCCACAGACTTCTCTCTGCTTCAGCGA | |
| | | | ATCTATTCCGACGCCTTCCAATCGCGAG | |
| | | | GAAACTCAGCAAAAGTCCAATCTGGAA | |
| | | | CTACTCCGCATTTCTCTGCTTCTGATTCA | |
| | | | GAGCTGGCTAGAACCAGTGCAATTTCTG | |
| | | | CGTTCCGTCTTCGCCAATAGCCTAGTTT | |
| | | | ATGGCGCATCCGACAGCAACGTATACG | |
| | | | ATCTCCTGAAAGATCTCGAGGAAGGCA | |
| | | | TTCAGACCCTGATGGGTCGTCTCGAGGA | |
| | | | TGGCTCTCCGCGTACTGGTCAGATCTTC | |
| | | | AAGCAGACTTACTCTAAATTTGATACTA | |
| | | | ACAGCCACAATGACGATGCGCTTCTAA | |
| | | | AAAACTATGGTCTGCTGTATTGTTTTCG | |
| | | | TAAAGATATGGACAAAGTTGAAACCTT | |
| | | | CCTGCGTATTGTTCAGTGTCGTTCCGTT | |
| | | | GAGGGCAGCTGTGGTTTCTAAGGTctgacc | |
| | | | ccgcgcagcctgctggtgggcggcGGTGGTACCTCT | |
| | | | GAAAGCGCAACTCCTGAGTCTGGCCCA | |
| | | | GGTAGCGAACCTGCTACCTCCGGCTCTG | |
| | | | AGACTCCAGGTACCTCTGAAAGCGCAA | |
| | | | CCCCGGAATCTGGTCCAGGTAGCGAAC | |
| | | | CTGCAACCTCTGGCTCTGAAACCCCAGG | |
| | | | TACCTCTGAAAGCGCTACTCCTGAATCT | |
| | | | GGCCCAGGTACTTCTACTGAACCGTCCG | |
| | | | AGGGCAGCGCACCAGGTAGCCCTGCTG | |
| | | | GCTCTCCAACCTCCACCGAAGAAGGTAC | |
| | | | CTCTGAAAGCGCAACCCCTGAATCCGGC | |
| | | | CCAGGTAGCGAACCGGCAACCTCCGGT | |
| | | | TCTGAAACCCCAGGTACTTCTGAAAGCG | |
| | | | CTACTCCTGAGTCCGGCCCAGGTAGCCC | |
| | | | GGCTGGCTCTCCGACTTCCACCGAGGAA | |
| | | | GGTAGCCCGGCTGGCTCTCCAACTTCTA | |
| | | | CTGAAGAAGGTACTTCTACCGAACCTTC | |
| | | | CGAGGGCAGCGCACCAGGTACTTCTGA | |
| | | | AAGCGCTACCCCTGAGTCCGGCCCAGGT | |
| | | | ACTTCTGAAAGCGCTACTCCTGAATCCG | |
| | | | GTCCAGGTACTTCTGAAAGCGCTACCCC | |
| | | | GGAATCTGGCCCAGGTAGCGAACCGGC | |
| | | | TACTTCTGGTTCTGAAACCCCAGGTAGC | |
| | | | GAACCGGCTACCTCCGGTTCTGAAACTC | |
| | | | CAGGTAGCCCAGCAGGCTCTCCGACTTC | |
| | | | CACTGAGGAAGGTACTTCTACTGAACCT | |
| | | | TCCGAAGGCAGCGCACCAGGTACCTCT | |
| | | | ACTGAACCTTCTGAGGGCAGCGCTCCAG | |
| | | | GTAGCGAACCTGCAACCTCTGGCTCTGA | |
| | | | AACCCCAGGTACCTCTGAAAGCGCTACT | |
| | | | CCTGAATCTGGCCCAGGTACTTCTACTG | |
| | | | AACCGTCCGAGGGCAGCGCACCA | |
| AE912- | MAEPAGSPTSTEEGT | 807 | ATGGCTGAACCTGCTGGCTCTCCAACCT | 808 |
| hGH- | PGSGTASSSPGSSTPS | | CCACTGAGGAAGGTACCCCGGGTAGCG | |
| FXIa- | GATGSPGASPGTSST | | GTACTGCTTCTTCCTCTCCAGGTAGCTCT | |
| AE288 | GSPGSPAGSPTSTEE | | ACCCCTTCTGGTGCAACCGGCTCTCCAG | |
| | GTSESATPESGPGTS | | GTGCTTCTCCGGGCACCAGCTCTACCGG | |
| | TEPSEGSAPGSPAGS | | TTCTCCAGGTAGCCCGGCTGGCTCTCCT | |
| | PTSTEEGTSTEPSEGS | | ACCTCTACTGAGGAAGGTACTTCTGAAA | |
| | APGTSTEPSEGSAPG | | GCGCTACTCCTGAGTCTGGTCCAGGTAC | |
| | TSESATPESGPGSEP | | CTCTACTGAACCGTCCGAAGGTAGCGCT | |
| | ATSGSETPGSEPATS | | CCAGGTAGCCCAGCAGGCTCTCCGACTT | |
| | GSETPGSPAGSPTST | | CCACTGAGGAAGGTACTTCTACTGAACC | |
| | EEGTSESATPESGPG | | TTCCGAAGGCAGCGCACCAGGTACCTCT | |
| | TSTEPSEGSAPGTSTE | | ACTGAACCTTCTGAGGGCAGCGCTCCAG | |
| | PSEGSAPGSPAGSPT | | GTACTTCTGAAAGCGCTACCCCGGAATC | |
| | STEEGTSTEPSEGSAP | | TGGCCCAGGTAGCGAACCGGCTACTTCT | |
| | GTSTEPSEGSAPGTS | | GGTTCTGAAACCCCAGGTAGCGAACCG | |
| | ESATPESGPGTSTEPS | | GCTACCTCCGGTTCTGAAACTCCAGGTA | |
| | EGSAPGTSESATPES | | GCCCGGCAGGCTCTCCGACCTCTACTGA | |
| | GPGSEPATSGSETPG | | GGAAGGTACTTCTGAAAGCGCAACCCC | |
| | TSTEPSEGSAPGTSTE | | GGAGTCCGGCCCAGGTACCTCTACCGA | |
| | PSEGSAPGTSESATP | | ACCGTCTGAGGGCAGCGCACCAGGTAC | |
| | ESGPGTSESATPESG | | TTCTACCGAACCGTCCGAGGGTAGCGCA | |
| | PGSPAGSPTSTEEGT | | CCAGGTAGCCCAGCAGGTTCTCCTACCT | |
| | SESATPESGPGSEPA | | CCACCGAGGAAGGTACTTCTACCGAAC | |
| | TSGSETPGTSESATPE | | CGTCCGAGGGTAGCGCACCAGGTACCT | |
| | SGPGTSTEPSEGSAP | | CTACTGAACCTTCTGAGGGCAGCGCTCC | |
| | GTSTEPSEGSAPGTS | | AGGTACTTCTGAAAGCGCTACCCCGGA | |
| | TEPSEGSAPGTSTEPS | | GTCCGGTCCAGGTACTTCTACTGAACCG | |
| | EGSAPGTSTEPSEGS | | TCCGAAGGTAGCGCACCAGGTACTTCTG | |
| | APGTSTEPSEGSAPG | | AAAGCGCAACCCCTGAATCCGGTCCAG | |
| | SPAGSPTSTEEGTSTE | | GTAGCGAACCGGCTACTTCTGGCTCTGA | |
| | PSEGSAPGTSESATP | | GACTCCAGGTACTTCTACCGAACCGTCC | |
| | ESGPGSEPATSGSET | | GAAGGTAGCGCACCAGGTACTTCTACTG | |
| | PGTSESATPESGPGS | | AACCGTCTGAAGGTAGCGCACCAGGTA | |
| | EPATSGSETPGTSES | | CTTCTGAAAGCGCAACCCCGGAATCCG | |
| | ATPESGPGTSTEPSE | | GCCCAGGTACCTCTGAAAGCGCAACCC | |
| | GSAPGTSESATPESG | | CGGAGTCCGGCCCAGGTAGCCCTGCTG | |
| | PGSPAGSPTSTEEGSP | | GCTCTCCAACCTCCACCGAAGAAGGTAC | |
| | AGSPTSTEEGSPAGS | | CTCTGAAAGCGCAACCCCTGAATCCGGC | |
| | PTSTEEGTSESATPES | | CCAGGTAGCGAACCGGCAACCTCCGGT | |
| | GPGTSTEPSEGSAPG | | TCTGAAACCCCAGGTACCTCTGAAAGCG | |
| | TSESATPESGPGSEP | | CTACTCCGGAGTCTGGCCCAGGTACCTC | |
| | ATSGSETPGTSESAT | | TACTGAACCGTCTGAGGGTAGCGCTCCA | |
| | PESGPGSEPATSGSE | | GGTACTTCTACTGAACCGTCCGAAGGTA | |
| | TPGTSESATPESGPG | | GCGCACCAGGTACTTCTACCGAACCGTC | |
| | TSTEPSEGSAPGSPA | | CGAAGGCAGCGCTCCAGGTACCTCTACT | |
| | GSPTSTEEGTSESATP | | GAACCTTCCGAGGGCAGCGCTCCAGGT | |
| | ESGPGSEPATSGSET | | ACCTCTACCGAACCTTCTGAAGGTAGCG | |
| | PGTSESATPESGPGSP | | CACCAGGTACTTCTACCGAACCGTCCGA | |
| | AGSPTSTEEGSPAGS | | GGGTAGCGCACCAGGTAGCCCAGCAGG | |
| | PTSTEEGTSTEPSEGS | | TTCTCCTACCTCCACCGAGGAAGGTACT | |
| | APGTSESATPESGPG | | TCTACCGAACCGTCCGAGGGTAGCGCA | |
| | TSESATPESGPGTSES | | CCAGGTACCTCTGAAAGCGCAACTCCTG | |
| | ATPESGPGSEPATSG | | AGTCTGGCCCAGGTAGCGAACCTGCTAC | |
| | SETPGSEPATSGSETP | | CTCCGGCTCTGAGACTCCAGGTACCTCT | |
| | GSPAGSPTSTEEGTS | | GAAAGCGCAACCCCGGAATCTGGTCCA | |
| | TEPSEGSAPGTSTEPS | | GGTAGCGAACCTGCAACCTCTGGCTCTG | |
| | EGSAPGSEPATSGSE | | AAACCCCAGGTACCTCTGAAAGCGCTA | |
| | TPGTSESATPESGPG | | CTCCTGAATCTGGCCCAGGTACTTCTAC | |
| | TSTEPSEGSAPGFPTI | | TGAACCGTCCGAGGGCAGCGCACCAGG | |
| | PL SRLFDNAMLRAH | | TACTTCTGAAAGCGCTACTCCTGAGTCC | |
| | RLHQLAFDTYQEFEE | | GGCCCAGGTAGCCCGGCTGGCTCTCCGA | |
| | AYIPKEQKYSFLQNP | | CTTCCACCGAGGAAGGTAGCCCGGCTG | |
| | QTSLCFSESIPTPSNR | | GCTCTCCAACTTCTACTGAAGAAGGTAG | |
| | EETQQKSNLELLRIS | | CCCGGCAGGCTCTCCGACCTCTACTGAG | |
| | LLLIQSWLEPVQFLR | | GAAGGTACTTCTGAAAGCGCAACCCCG | |
| | SVFANSLVYGASDS | | GAGTCCGGCCCAGGTACCTCTACCGAAC | |
| | NVYDLLKDLEEGIQT | | CGTCTGAGGGCAGCGCACCAGGTACCT | |
| | LMGRLEDGSPRTGQI | | CTGAAAGCGCAACTCCTGAGTCTGGCCC | |
| | FKQTYSKFDTNSHN | | AGGTAGCGAACCTGCTACCTCCGGCTCT | |
| | DDALLKNYGLLYCF | | GAGACTCCAGGTACCTCTGAAAGCGCA | |
| | RKDMDKVETFLRIV | | ACCCCGGAATCTGGTCCAGGTAGCGAA | |
| | QCRSVEGSCGFGGG | | CCTGCAACCTCTGGCTCTGAAACCCCAG | |
| | KLTRVVGGGGTSES | | GTACCTCTGAAAGCGCTACTCCTGAATC | |
| | ATPESGPGSEPATSG | | TGGCCCAGGTACTTCTACTGAACCGTCC | |
| | SETPGTSESATPESGP | | GAGGGCAGCGCACCAGGTAGCCCTGCT | |
| | GSEPATSGSETPGTS | | GGCTCTCCAACCTCCACCGAAGAAGGT | |
| | ESATPESGPGTSTEPS | | ACCTCTGAAAGCGCAACCCCTGAATCCG | |
| | EGSAPGSPAGSPTST | | GCCCAGGTAGCGAACCGGCAACCTCCG | |
| | EEGTSESATPESGPG | | GTTCTGAAACCCCAGGTACTTCTGAAAG | |
| | SEPATSGSETPGTSES | | CGCTACTCCTGAGTCCGGCCCAGGTAGC | |
| | ATPESGPGSPAGSPT | | CCGGCTGGCTCTCCGACTTCCACCGAGG | |
| | STEEGSPAGSPTSTEE | | AAGGTAGCCCGGCTGGCTCTCCAACTTC | |
| | GTSTEPSEGSAPGTS | | TACTGAAGAAGGTACTTCTACCGAACCT | |
| | ESATPESGPGTSESA | | TCCGAGGGCAGCGCACCAGGTACTTCTG | |
| | TPESGPGTSESATPES | | AAAGCGCTACCCCTGAGTCCGGCCCAG | |
| | GPGSEPATSGSETPG | | GTACTTCTGAAAGCGCTACTCCTGAATC | |
| | SEPATSGSETPGSPA | | CGGTCCAGGTACTTCTGAAAGCGCTACC | |
| | GSPTSTEEGTSTEPSE | | CCGGAATCTGGCCCAGGTAGCGAACCG | |
| | GSAPGTSTEPSEGSA | | GCTACTTCTGGTTCTGAAACCCCAGGTA | |
| | PGSEPATSGSETPGT | | GCGAACCGGCTACCTCCGGTTCTGAAAC | |
| | SESATPESGPGTSTEP | | TCCAGGTAGCCCAGCAGGCTCTCCGACT | |
| | SEGSAP | | TCCACTGAGGAAGGTACTTCTACTGAAC | |
| | | | CTTCCGAAGGCAGCGCACCAGGTACCTC | |
| | | | TACTGAACCTTCTGAGGGCAGCGCTCCA | |
| | | | GGTAGCGAACCTGCAACCTCTGGCTCTG | |
| | | | AAACCCCAGGTACCTCTGAAAGCGCTA | |
| | | | CTCCTGAATCTGGCCCAGGTACTTCTAC | |
| | | | TGAACCGTCCGAGGGCAGCGCACCAGG | |
| | | | TTTTCCGACTATTCCGCTGTCTCGTCTGT | |
| | | | TTGATAATGCTATGCTGCGTGCGCACCG | |
| | | | TCTGCACCAGCTGGCCTTTGATACTTAC | |
| | | | CAGGAATTTGAAGAAGCcTACATTCCTA | |
| | | | AAGAGCAGAAGTACTCTTTCCTGCAAA | |
| | | | ACCCACAGACTTCTCTCTGCTTCAGCGA | |
| | | | ATCTATTCCGACGCCTTCCAATCGCGAG | |
| | | | GAAACTCAGCAAAAGTCCAATCTGGAA | |
| | | | CTACTCCGCATTTCTCTGCTTCTGATTCA | |
| | | | GAGCTGGCTAGAACCAGTGCAATTTCTG | |
| | | | CGTTCCGTCTTCGCCAATAGCCTAGTTT | |
| | | | ATGGCGCATCCGACAGCAACGTATACG | |
| | | | ATCTCCTGAAAGATCTCGAGGAAGGCA | |
| | | | TTCAGACCCTGATGGGTCGTCTCGAGGA | |
| | | | TGGCTCTCCGCGTACTGGTCAGATCTTC | |
| | | | AAGCAGACTTACTCTAAATTTGATACTA | |
| | | | ACAGCCACAATGACGATGCGCTTCTAA | |
| | | | AAAACTATGGTCTGCTGTATTGTTTTCG | |
| | | | TAAAGATATGGACAAAGTTGAAACCTT | |
| | | | CCTGCGTATTGTTCAGTGTCGTTCCGTT | |
| | | | GAGGGCAGCTGTGGTTTCTAAGGTggcgg | |
| | | | caaactgacccgcgtggtgggcggcGGTGGTACCTC | |
| | | | TGAAAGCGCAACTCCTGAGTCTGGCCCA | |
| | | | GGTAGCGAACCTGCTACCTCCGGCTCTG | |
| | | | AGACTCCAGGTACCTCTGAAAGCGCAA | |
| | | | CCCCGGAATCTGGTCCAGGTAGCGAAC | |
| | | | CTGCAACCTCTGGCTCTGAAACCCCAGG | |
| | | | TACCTCTGAAAGCGCTACTCCTGAATCT | |
| | | | GGCCCAGGTACTTCTACTGAACCGTCCG | |
| | | | AGGGCAGCGCACCAGGTAGCCCTGCTG | |
| | | | GCTCTCCAACCTCCACCGAAGAAGGTAC | |
| | | | CTCTGAAAGCGCAACCCCTGAATCCGGC | |
| | | | CCAGGTAGCGAACCGGCAACCTCCGGT | |
| | | | TCTGAAACCCCAGGTACTTCTGAAAGCG | |
| | | | CTACTCCTGAGTCCGGCCCAGGTAGCCC | |
| | | | GGCTGGCTCTCCGACTTCCACCGAGGAA | |
| | | | GGTAGCCCGGCTGGCTCTCCAACTTCTA | |
| | | | CTGAAGAAGGTACTTCTACCGAACCTTC | |
| | | | CGAGGGCAGCGCACCAGGTACTTCTGA | |
| | | | AAGCGCTACCCCTGAGTCCGGCCCAGGT | |
| | | | ACTTCTGAAAGCGCTACTCCTGAATCCG | |
| | | | GTCCAGGTACTTCTGAAAGCGCTACCCC | |
| | | | GGAATCTGGCCCAGGTAGCGAACCGGC | |
| | | | TACTTCTGGTTCTGAAACCCCAGGTAGC | |
| | | | GAACCGGCTACCTCCGGTTCTGAAACTC | |
| | | | CAGGTAGCCCAGCAGGCTCTCCGACTTC | |
| | | | CACTGAGGAAGGTACTTCTACTGAACCT | |
| | | | TCCGAAGGCAGCGCACCAGGTACCTCT | |
| | | | ACTGAACCTTCTGAGGGCAGCGCTCCAG | |
| | | | GTAGCGAACCTGCAACCTCTGGCTCTGA | |
| | | | AACCCCAGGTACCTCTGAAAGCGCTACT | |
| | | | CCTGAATCTGGCCCAGGTACTTCTACTG | |
| | | | AACCGTCCGAGGGCAGCGCACCA | |
| AE912- | MAEPAGSPTSTEEGT | 809 | ATGGCTGAACCTGCTGGCTCTCCAACCT | 810 |
| hGH- | PGSGTASSSPGSSTPS | | CCACTGAGGAAGGTACCCCGGGTAGCG | |
| Elastase- | GATGSPGASPGTSST | | GTACTGCTTCTTCCTCTCCAGGTAGCTCT | |
| AE288 | GSPGSPAGSPTSTEE | | ACCCCTTCTGGTGCAACCGGCTCTCCAG | |
| | GTSESATPESGPGTS | | GTGCTTCTCCGGGCACCAGCTCTACCGG | |
| | TEPSEGSAPGSPAGS | | TTCTCCAGGTAGCCCGGCTGGCTCTCCT | |
| | PTSTEEGTSTEPSEGS | | ACCTCTACTGAGGAAGGTACTTCTGAAA | |
| | APGTSTEPSEGSAPG | | GCGCTACTCCTGAGTCTGGTCCAGGTAC | |
| | TSESATPESGPGSEP | | CTCTACTGAACCGTCCGAAGGTAGCGCT | |
| | ATSGSETPGSEPATS | | CCAGGTAGCCCAGCAGGCTCTCCGACTT | |
| | GSETPGSPAGSPTST | | CCACTGAGGAAGGTACTTCTACTGAACC | |
| | EEGTSESATPESGPG | | TTCCGAAGGCAGCGCACCAGGTACCTCT | |
| | TSTEPSEGSAPGTSTE | | ACTGAACCTTCTGAGGGCAGCGCTCCAG | |
| | PSEGSAPGSPAGSPT | | GTACTTCTGAAAGCGCTACCCCGGAATC | |
| | STEEGTSTEPSEGSAP | | TGGCCCAGGTAGCGAACCGGCTACTTCT | |
| | GTSTEPSEGSAPGTS | | GGTTCTGAAACCCCAGGTAGCGAACCG | |
| | ESATPESGPGTSTEPS | | GCTACCTCCGGTTCTGAAACTCCAGGTA | |
| | EGSAPGTSESATPES | | GCCCGGCAGGCTCTCCGACCTCTACTGA | |
| | GPGSEPATSGSETPG | | GGAAGGTACTTCTGAAAGCGCAACCCC | |
| | TSTEPSEGSAPGTSTE | | GGAGTCCGGCCCAGGTACCTCTACCGA | |
| | PSEGSAPGTSESATP | | ACCGTCTGAGGGCAGCGCACCAGGTAC | |
| | ESGPGTSESATPESG | | TTCTACCGAACCGTCCGAGGGTAGCGCA | |
| | PGSPAGSPTSTEEGT | | CCAGGTAGCCCAGCAGGTTCTCCTACCT | |
| | SESATPESGPGSEPA | | CCACCGAGGAAGGTACTTCTACCGAAC | |
| | TSGSETPGTSESATPE | | CGTCCGAGGGTAGCGCACCAGGTACCT | |
| | SGPGTSTEPSEGSAP | | CTACTGAACCTTCTGAGGGCAGCGCTCC | |
| | GTSTEPSEGSAPGTS | | AGGTACTTCTGAAAGCGCTACCCCGGA | |
| | TEPSEGSAPGTSTEPS | | GTCCGGTCCAGGTACTTCTACTGAACCG | |
| | EGSAPGTSTEPSEGS | | TCCGAAGGTAGCGCACCAGGTACTTCTG | |
| | APGTSTEPSEGSAPG | | AAAGCGCAACCCCTGAATCCGGTCCAG | |
| | SPAGSPTSTEEGTSTE | | GTAGCGAACCGGCTACTTCTGGCTCTGA | |
| | PSEGSAPGTSESATP | | GACTCCAGGTACTTCTACCGAACCGTCC | |
| | ESGPGSEPATSGSET | | GAAGGTAGCGCACCAGGTACTTCTACTG | |
| | PGTSESATPESGPGS | | AACCGTCTGAAGGTAGCGCACCAGGTA | |
| | EPATSGSETPGTSES | | CTTCTGAAAGCGCAACCCCGGAATCCG | |
| | ATPESGPGTSTEPSE | | GCCCAGGTACCTCTGAAAGCGCAACCC | |
| | GSAPGTSESATPESG | | CGGAGTCCGGCCCAGGTAGCCCTGCTG | |
| | PGSPAGSPTSTEEGSP | | GCTCTCCAACCTCCACCGAAGAAGGTAC | |
| | AGSPTSTEEGSPAGS | | CTCTGAAAGCGCAACCCCTGAATCCGGC | |
| | PTSTEEGTSESATPES | | CCAGGTAGCGAACCGGCAACCTCCGGT | |
| | GPGTSTEPSEGSAPG | | TCTGAAACCCCAGGTACCTCTGAAAGCG | |
| | TSESATPESGPGSEP | | CTACTCCGGAGTCTGGCCCAGGTACCTC | |
| | ATSGSETPGTSESAT | | TACTGAACCGTCTGAGGGTAGCGCTCCA | |
| | PESGPGSEPATSGSE | | GGTACTTCTACTGAACCGTCCGAAGGTA | |
| | TPGTSESATPESGPG | | GCGCACCAGGTACTTCTACCGAACCGTC | |
| | TSTEPSEGSAPGSPA | | CGAAGGCAGCGCTCCAGGTACCTCTACT | |
| | GSPTSTEEGTSESATP | | GAACCTTCCGAGGGCAGCGCTCCAGGT | |
| | ESGPGSEPATSGSET | | ACCTCTACCGAACCTTCTGAAGGTAGCG | |
| | PGTSESATPESGPGSP | | CACCAGGTACTTCTACCGAACCGTCCGA | |
| | AGSPTSTEEGSPAGS | | GGGTAGCGCACCAGGTAGCCCAGCAGG | |
| | PTSTEEGTSTEPSEGS | | TTCTCCTACCTCCACCGAGGAAGGTACT | |
| | APGTSESATPESGPG | | TCTACCGAACCGTCCGAGGGTAGCGCA | |
| | TSESATPESGPGTSES | | CCAGGTACCTCTGAAAGCGCAACTCCTG | |
| | ATPESGPGSEPATSG | | AGTCTGGCCCAGGTAGCGAACCTGCTAC | |
| | SETPGSEPATSGSETP | | CTCCGGCTCTGAGACTCCAGGTACCTCT | |
| | GSPAGSPTSTEEGTS | | GAAAGCGCAACCCCGGAATCTGGTCCA | |
| | TEPSEGSAPGTSTEPS | | GGTAGCGAACCTGCAACCTCTGGCTCTG | |
| | EGSAPGSEPATSGSE | | AAACCCCAGGTACCTCTGAAAGCGCTA | |
| | TPGTSESATPESGPG | | CTCCTGAATCTGGCCCAGGTACTTCTAC | |
| | TSTEPSEGSAPGFPTI | | TGAACCGTCCGAGGGCAGCGCACCAGG | |
| | PLSRLFDNAMLRAH | | TACTTCTGAAAGCGCTACTCCTGAGTCC | |
| | RLHQLAFDTYQEFEE | | GGCCCAGGTAGCCCGGCTGGCTCTCCGA | |
| | AYIPKEQKYSFLQNP | | CTTCCACCGAGGAAGGTAGCCCGGCTG | |
| | QTSLCFSESIPTPSNR | | GCTCTCCAACTTCTACTGAAGAAGGTAG | |
| | EETQQKSNLELLRIS | | CCCGGCAGGCTCTCCGACCTCTACTGAG | |
| | LLLIQSWLEPVQFLR | | GAAGGTACTTCTGAAAGCGCAACCCCG | |
| | SVFANSLVYGASDS | | GAGTCCGGCCCAGGTACCTCTACCGAAC | |
| | NVYDLLKDLEEGIQT | | CGTCTGAGGGCAGCGCACCAGGTACCT | |
| | LMGRLEDGSPRTGQI | | CTGAAAGCGCAACTCCTGAGTCTGGCCC | |
| | FKQTYSKFDTNSHN | | AGGTAGCGAACCTGCTACCTCCGGCTCT | |
| | DDALLKNYGLLYCF | | GAGACTCCAGGTACCTCTGAAAGCGCA | |
| | RKDMDKVETFLRIV | | ACCCCGGAATCTGGTCCAGGTAGCGAA | |
| | QCRSVEGSCGFGGG | | CCTGCAACCTCTGGCTCTGAAACCCCAG | |
| | LGPVSGVPGGTSESA | | GTACCTCTGAAAGCGCTACTCCTGAATC | |
| | TPESGPGSEPATSGS | | TGGCCCAGGTACTTCTACTGAACCGTCC | |
| | ETPGTSESATPESGP | | GAGGGCAGCGCACCAGGTAGCCCTGCT | |
| | GSEPATSGSETPGTS | | GGCTCTCCAACCTCCACCGAAGAAGGT | |
| | ESATPESGPGTSTEPS | | ACCTCTGAAAGCGCAACCCCTGAATCCG | |
| | EGSAPGSPAGSPTST | | GCCCAGGTAGCGAACCGGCAACCTCCG | |
| | EEGTSESATPESGPG | | GTTCTGAAACCCCAGGTACTTCTGAAAG | |
| | SEPATSGSETPGTSES | | CGCTACTCCTGAGTCCGGCCCAGGTAGC | |
| | ATPESGPGSPAGSPT | | CCGGCTGGCTCTCCGACTTCCACCGAGG | |
| | STEEGSPAGSPTSTEE | | AAGGTAGCCCGGCTGGCTCTCCAACTTC | |
| | GTSTEPSEGSAPGTS | | TACTGAAGAAGGTACTTCTACCGAACCT | |
| | ESATPESGPGTSESA | | TCCGAGGGCAGCGCACCAGGTACTTCTG | |
| | TPESGPGTSESATPES | | AAAGCGCTACCCCTGAGTCCGGCCCAG | |
| | GPGSEPATSGSETPG | | GTACTTCTGAAAGCGCTACTCCTGAATC | |
| | SEPATSGSETPGSPA | | CGGTCCAGGTACTTCTGAAAGCGCTACC | |
| | GSPTSTEEGTSTEPSE | | CCGGAATCTGGCCCAGGTAGCGAACCG | |
| | GSAPGTSTEPSEGSA | | GCTACTTCTGGTTCTGAAACCCCAGGTA | |
| | PGSEPATSGSETPGT | | GCGAACCGGCTACCTCCGGTTCTGAAAC | |
| | SESATPESGPGTSTEP | | TCCAGGTAGCCCAGCAGGCTCTCCGACT | |
| | SEGSAP | | TCCACTGAGGAAGGTACTTCTACTGAAC | |
| | | | CTTCCGAAGGCAGCGCACCAGGTACCTC | |
| | | | TACTGAACCTTCTGAGGGCAGCGCTCCA | |
| | | | GGTAGCGAACCTGCAACCTCTGGCTCTG | |
| | | | AAACCCCAGGTACCTCTGAAAGCGCTA | |
| | | | CTCCTGAATCTGGCCCAGGTACTTCTAC | |
| | | | TGAACCGTCCGAGGGCAGCGCACCAGG | |
| | | | TTTTCCGACTATTCCGCTGTCTCGTCTGT | |
| | | | TTGATAATGCTATGCTGCGTGCGCACCG | |
| | | | TCTGCACCAGCTGGCCTTTGATACTTAC | |
| | | | CAGGAATTTGAAGAAGCcTACATTCCTA | |
| | | | AAGAGCAGAAGTACTCTTTCCTGCAAA | |
| | | | ACCCACAGACTTCTCTCTGCTTCAGCGA | |
| | | | ATCTATTCCGACGCCTTCCAATCGCGAG | |
| | | | GAAACTCAGCAAAAGTCCAATCTGGAA | |
| | | | CTACTCCGCATTTCTCTGCTTCTGATTCA | |
| | | | GAGCTGGCTAGAACCAGTGCAATTTCTG | |
| | | | CGTTCCGTCTTCGCCAATAGCCTAGTTT | |
| | | | ATGGCGCATCCGACAGCAACGTATACG | |
| | | | ATCTCCTGAAAGATCTCGAGGAAGGCA | |
| | | | TTCAGACCCTGATGGGTCGTCTCGAGGA | |
| | | | TGGCTCTCCGCGTACTGGTCAGATCTTC | |
| | | | AAGCAGACTTACTCTAAATTTGATACTA | |
| | | | ACAGCCACAATGACGATGCGCTTCTAA | |
| | | | AAAACTATGGTCTGCTGTATTGTTTTCG | |
| | | | TAAAGATATGGACAAAGTTGAAACCTT | |
| | | | CCTGCGTATTGTTCAGTGTCGTTCCGTT | |
| | | | GAGGGCAGCTGTGGTTTCTAAGGTggcgg | |
| | | | cctgggcccggtgagcggcgtgccgGGTGGTACCTC | |
| | | | TGAAAGCGCAACTCCTGAGTCTGGCCCA | |
| | | | GGTAGCGAACCTGCTACCTCCGGCTCTG | |
| | | | AGACTCCAGGTACCTCTGAAAGCGCAA | |
| | | | CCCCGGAATCTGGTCCAGGTAGCGAAC | |
| | | | CTGCAACCTCTGGCTCTGAAACCCCAGG | |
| | | | TACCTCTGAAAGCGCTACTCCTGAATCT | |
| | | | GGCCCAGGTACTTCTACTGAACCGTCCG | |
| | | | AGGGCAGCGCACCAGGTAGCCCTGCTG | |
| | | | GCTCTCCAACCTCCACCGAAGAAGGTAC | |
| | | | CTCTGAAAGCGCAACCCCTGAATCCGGC | |
| | | | CCAGGTAGCGAACCGGCAACCTCCGGT | |
| | | | TCTGAAACCCCAGGTACTTCTGAAAGCG | |
| | | | CTACTCCTGAGTCCGGCCCAGGTAGCCC | |
| | | | GGCTGGCTCTCCGACTTCCACCGAGGAA | |
| | | | GGTAGCCCGGCTGGCTCTCCAACTTCTA | |
| | | | CTGAAGAAGGTACTTCTACCGAACCTTC | |
| | | | CGAGGGCAGCGCACCAGGTACTTCTGA | |
| | | | AAGCGCTACCCCTGAGTCCGGCCCAGGT | |
| | | | ACTTCTGAAAGCGCTACTCCTGAATCCG | |
| | | | GTCCAGGTACTTCTGAAAGCGCTACCCC | |
| | | | GGAATCTGGCCCAGGTAGCGAACCGGC | |
| | | | TACTTCTGGTTCTGAAACCCCAGGTAGC | |
| | | | GAACCGGCTACCTCCGGTTCTGAAACTC | |
| | | | CAGGTAGCCCAGCAGGCTCTCCGACTTC | |
| | | | CACTGAGGAAGGTACTTCTACTGAACCT | |
| | | | TCCGAAGGCAGCGCACCAGGTACCTCT | |
| | | | ACTGAACCTTCTGAGGGCAGCGCTCCAG | |
| | | | GTAGCGAACCTGCAACCTCTGGCTCTGA | |
| | | | AACCCCAGGTACCTCTGAAAGCGCTACT | |
| | | | CCTGAATCTGGCCCAGGTACTTCTACTG | |
| | | | AACCGTCCGAGGGCAGCGCACCA | |
| AE912- | MAEPAGSPTSTEEGT | 811 | ATGGCTGAACCTGCTGGCTCTCCAACCT | 812 |
| hGH- | PGSGTASSSPGSSTPS | | CCACTGAGGAAGGTACCCCGGGTAGCG | |
| MMP-17- | GATGSPGASPGTSST | | GTACTGCTTCTTCCTCTCCAGGTAGCTCT | |
| AE288 | GSPGSPAGSPTSTEE | | ACCCCTTCTGGTGCAACCGGCTCTCCAG | |
| | GTSESATPESGPGTS | | GTGCTTCTCCGGGCACCAGCTCTACCGG | |
| | TEPSEGSAPGSPAGS | | TTCTCCAGGTAGCCCGGCTGGCTCTCCT | |
| | PTSTEEGTSTEPSEGS | | ACCTCTACTGAGGAAGGTACTTCTGAAA | |
| | APGTSTEPSEGSAPG | | GCGCTACTCCTGAGTCTGGTCCAGGTAC | |
| | TSESATPESGPGSEP | | CTCTACTGAACCGTCCGAAGGTAGCGCT | |
| | ATSGSETPGSEPATS | | CCAGGTAGCCCAGCAGGCTCTCCGACTT | |
| | GSETPGSPAGSPTST | | CCACTGAGGAAGGTACTTCTACTGAACC | |
| | EEGTSESATPESGPG | | TTCCGAAGGCAGCGCACCAGGTACCTCT | |
| | TSTEPSEGSAPGTSTE | | ACTGAACCTTCTGAGGGCAGCGCTCCAG | |
| | PSEGSAPGSPAGSPT | | GTACTTCTGAAAGCGCTACCCCGGAATC | |
| | STEEGTSTEPSEGSAP | | TGGCCCAGGTAGCGAACCGGCTACTTCT | |
| | GTSTEPSEGSAPGTS | | GGTTCTGAAACCCCAGGTAGCGAACCG | |
| | ESATPESGPGTSTEPS | | GCTACCTCCGGTTCTGAAACTCCAGGTA | |
| | EGSAPGTSESATPES | | GCCCGGCAGGCTCTCCGACCTCTACTGA | |
| | GPGSEPATSGSETPG | | GGAAGGTACTTCTGAAAGCGCAACCCC | |
| | TSTEPSEGSAPGTSTE | | GGAGTCCGGCCCAGGTACCTCTACCGA | |
| | PSEGSAPGTSESATP | | ACCGTCTGAGGGCAGCGCACCAGGTAC | |
| | ESGPGTSESATPESG | | TTCTACCGAACCGTCCGAGGGTAGCGCA | |
| | PGSPAGSPTSTEEGT | | CCAGGTAGCCCAGCAGGTTCTCCTACCT | |
| | SESATPESGPGSEPA | | CCACCGAGGAAGGTACTTCTACCGAAC | |
| | TSGSETPGTSESATPE | | CGTCCGAGGGTAGCGCACCAGGTACCT | |
| | SGPGTSTEPSEGSAP | | CTACTGAACCTTCTGAGGGCAGCGCTCC | |
| | GTSTEPSEGSAPGTS | | AGGTACTTCTGAAAGCGCTACCCCGGA | |
| | TEPSEGSAPGTSTEPS | | GTCCGGTCCAGGTACTTCTACTGAACCG | |
| | EGSAPGTSTEPSEGS | | TCCGAAGGTAGCGCACCAGGTACTTCTG | |
| | APGTSTEPSEGSAPG | | AAAGCGCAACCCCTGAATCCGGTCCAG | |
| | SPAGSPTSTEEGTSTE | | GTAGCGAACCGGCTACTTCTGGCTCTGA | |
| | PSEGSAPGTSESATP | | GACTCCAGGTACTTCTACCGAACCGTCC | |
| | ESGPGSEPATSGSET | | GAAGGTAGCGCACCAGGTACTTCTACTG | |
| | PGTSESATPESGPGS | | AACCGTCTGAAGGTAGCGCACCAGGTA | |
| | EPATSGSETPGTSES | | CTTCTGAAAGCGCAACCCCGGAATCCG | |
| | ATPESGPGTSTEPSE | | GCCCAGGTACCTCTGAAAGCGCAACCC | |
| | GSAPGTSESATPESG | | CGGAGTCCGGCCCAGGTAGCCCTGCTG | |
| | PGSPAGSPTSTEEGSP | | GCTCTCCAACCTCCACCGAAGAAGGTAC | |
| | AGSPTSTEEGSPAGS | | CTCTGAAAGCGCAACCCCTGAATCCGGC | |
| | PTSTEEGTSESATPES | | CCAGGTAGCGAACCGGCAACCTCCGGT | |
| | GPGTSTEPSEGSAPG | | TCTGAAACCCCAGGTACCTCTGAAAGCG | |
| | TSESATPESGPGSEP | | CTACTCCGGAGTCTGGCCCAGGTACCTC | |
| | ATSGSETPGTSESAT | | TACTGAACCGTCTGAGGGTAGCGCTCCA | |
| | PESGPGSEPATSGSE | | GGTACTTCTACTGAACCGTCCGAAGGTA | |
| | TPGTSESATPESGPG | | GCGCACCAGGTACTTCTACCGAACCGTC | |
| | TSTEPSEGSAPGSPA | | CGAAGGCAGCGCTCCAGGTACCTCTACT | |
| | GSPTSTEEGTSESATP | | GAACCTTCCGAGGGCAGCGCTCCAGGT | |
| | ESGPGSEPATSGSET | | ACCTCTACCGAACCTTCTGAAGGTAGCG | |
| | PGTSESATPESGPGSP | | CACCAGGTACTTCTACCGAACCGTCCGA | |
| | AGSPTSTEEGSPAGS | | GGGTAGCGCACCAGGTAGCCCAGCAGG | |
| | PTSTEEGTSTEPSEGS | | TTCTCCTACCTCCACCGAGGAAGGTACT | |
| | APGTSESATPESGPG | | TCTACCGAACCGTCCGAGGGTAGCGCA | |
| | TSESATPESGPGTSES | | CCAGGTACCTCTGAAAGCGCAACTCCTG | |
| | ATPESGPGSEPATSG | | AGTCTGGCCCAGGTAGCGAACCTGCTAC | |
| | SETPGSEPATSGSETP | | CTCCGGCTCTGAGACTCCAGGTACCTCT | |
| | GSPAGSPTSTEEGTS | | GAAAGCGCAACCCCGGAATCTGGTCCA | |
| | TEPSEGSAPGTSTEPS | | GGTAGCGAACCTGCAACCTCTGGCTCTG | |
| | EGSAPGSEPATSGSE | | AAACCCCAGGTACCTCTGAAAGCGCTA | |
| | TPGTSESATPESGPG | | CTCCTGAATCTGGCCCAGGTACTTCTAC | |
| | TSTEPSEGSAPGFPTI | | TGAACCGTCCGAGGGCAGCGCACCAGG | |
| | PLSRLFDNAMLRAH | | TACTTCTGAAAGCGCTACTCCTGAGTCC | |
| | RLHQLAFDTYQEFEE | | GGCCCAGGTAGCCCGGCTGGCTCTCCGA | |
| | AYIPKEQKYSFLQNP | | CTTCCACCGAGGAAGGTAGCCCGGCTG | |
| | QTSLCFSESIPTPSNR | | GCTCTCCAACTTCTACTGAAGAAGGTAG | |
| | EETQQKSNLELLRIS | | CCCGGCAGGCTCTCCGACCTCTACTGAG | |
| | LLLIQSWLEPVQFLR | | GAAGGTACTTCTGAAAGCGCAACCCCG | |
| | SVFANSLVYGASDS | | GAGTCCGGCCCAGGTACCTCTACCGAAC | |
| | NVYDLLKDLEEGIQT | | CGTCTGAGGGCAGCGCACCAGGTACCT | |
| | LMGRLEDGSPRTGQI | | CTGAAAGCGCAACTCCTGAGTCTGGCCC | |
| | FKQTYSKFDTNSHN | | AGGTAGCGAACCTGCTACCTCCGGCTCT | |
| | DDALLKNYGLLYCF | | GAGACTCCAGGTACCTCTGAAAGCGCA | |
| | RKDMDKVETFLRIV | | ACCCCGGAATCTGGTCCAGGTAGCGAA | |
| | QCRSVEGSCGFGAPL | | CCTGCAACCTCTGGCTCTGAAACCCCAG | |
| | GLRLRGGGGTSESA | | GTACCTCTGAAAGCGCTACTCCTGAATC | |
| | TPESGPGSEPATSGS | | TGGCCCAGGTACTTCTACTGAACCGTCC | |
| | ETPGTSESATPESGP | | GAGGGCAGCGCACCAGGTAGCCCTGCT | |
| | GSEPATSGSETPGTS | | GGCTCTCCAACCTCCACCGAAGAAGGT | |
| | ESATPESGPGTSTEPS | | ACCTCTGAAAGCGCAACCCCTGAATCCG | |
| | EGSAPGSPAGSPTST | | GCCCAGGTAGCGAACCGGCAACCTCCG | |
| | EEGTSESATPESGPG | | GTTCTGAAACCCCAGGTACTTCTGAAAG | |
| | SEPATSGSETPGTSES | | CGCTACTCCTGAGTCCGGCCCAGGTAGC | |
| | ATPESGPGSPAGSPT | | CCGGCTGGCTCTCCGACTTCCACCGAGG | |
| | STEEGSPAGSPTSTEE | | AAGGTAGCCCGGCTGGCTCTCCAACTTC | |
| | GTSTEPSEGSAPGTS | | TACTGAAGAAGGTACTTCTACCGAACCT | |
| | ESATPESGPGTSESA | | TCCGAGGGCAGCGCACCAGGTACTTCTG | |
| | TPESGPGTSESATPES | | AAAGCGCTACCCCTGAGTCCGGCCCAG | |
| | GPGSEPATSGSETPG | | GTACTTCTGAAAGCGCTACTCCTGAATC | |
| | SEPATSGSETPGSPA | | CGGTCCAGGTACTTCTGAAAGCGCTACC | |
| | GSPTSTEEGTSTEPSE | | CCGGAATCTGGCCCAGGTAGCGAACCG | |
| | GSAPGTSTEPSEGSA | | GCTACTTCTGGTTCTGAAACCCCAGGTA | |
| | PGSEPATSGSETPGT | | GCGAACCGGCTACCTCCGGTTCTGAAAC | |
| | SESATPESGPGTSTEP | | TCCAGGTAGCCCAGCAGGCTCTCCGACT | |
| | SEGSAP | | TCCACTGAGGAAGGTACTTCTACTGAAC | |
| | | | CTTCCGAAGGCAGCGCACCAGGTACCTC | |
| | | | TACTGAACCTTCTGAGGGCAGCGCTCCA | |
| | | | GGTAGCGAACCTGCAACCTCTGGCTCTG | |
| | | | AAACCCCAGGTACCTCTGAAAGCGCTA | |
| | | | CTCCTGAATCTGGCCCAGGTACTTCTAC | |
| | | | TGAACCGTCCGAGGGCAGCGCACCAGG | |
| | | | TTTTCCGACTATTCCGCTGTCTCGTCTGT | |
| | | | TTGATAATGCTATGCTGCGTGCGCACCG | |
| | | | TCTGCACCAGCTGGCCTTTGATACTTAC | |
| | | | CAGGAATTTGAAGAAGCcTACATTCCTA | |
| | | | AAGAGCAGAAGTACTCTTTCCTGCAAA | |
| | | | ACCCACAGACTTCTCTCTGCTTCAGCGA | |
| | | | ATCTATTCCGACGCCTTCCAATCGCGAG | |
| | | | GAAACTCAGCAAAAGTCCAATCTGGAA | |
| | | | CTACTCCGCATTTCTCTGCTTCTGATTCA | |
| | | | GAGCTGGCTAGAACCAGTGCAATTTCTG | |
| | | | CGTTCCGTCTTCGCCAATAGCCTAGTTT | |
| | | | ATGGCGCATCCGACAGCAACGTATACG | |
| | | | ATCTCCTGAAAGATCTCGAGGAAGGCA | |
| | | | TTCAGACCCTGATGGGTCGTCTCGAGGA | |
| | | | TGGCTCTCCGCGTACTGGTCAGATCTTC | |
| | | | AAGCAGACTTACTCTAAATTTGATACTA | |
| | | | ACAGCCACAATGACGATGCGCTTCTAA | |
| | | | AAAACTATGGTCTGCTGTATTGTTTTCG | |
| | | | TAAAGATATGGACAAAGTTGAAACCTT | |
| | | | CCTGCGTATTGTTCAGTGTCGTTCCGTT | |
| | | | GAGGGCAGCTGTGGTTTCTAAGGTgcgcc | |
| | | | gctgggcctgcgcctgcgcggcggcGGTGGTACCTC | |
| | | | TGAAAGCGCAACTCCTGAGTCTGGCCCA | |
| | | | GGTAGCGAACCTGCTACCTCCGGCTCTG | |
| | | | AGACTCCAGGTACCTCTGAAAGCGCAA | |
| | | | CCCCGGAATCTGGTCCAGGTAGCGAAC | |
| | | | CTGCAACCTCTGGCTCTGAAACCCCAGG | |
| | | | TACCTCTGAAAGCGCTACTCCTGAATCT | |
| | | | GGCCCAGGTACTTCTACTGAACCGTCCG | |
| | | | AGGGCAGCGCACCAGGTAGCCCTGCTG | |
| | | | GCTCTCCAACCTCCACCGAAGAAGGTAC | |
| | | | CTCTGAAAGCGCAACCCCTGAATCCGGC | |
| | | | CCAGGTAGCGAACCGGCAACCTCCGGT | |
| | | | TCTGAAACCCCAGGTACTTCTGAAAGCG | |
| | | | CTACTCCTGAGTCCGGCCCAGGTAGCCC | |
| | | | GGCTGGCTCTCCGACTTCCACCGAGGAA | |
| | | | GGTAGCCCGGCTGGCTCTCCAACTTCTA | |
| | | | CTGAAGAAGGTACTTCTACCGAACCTTC | |
| | | | CGAGGGCAGCGCACCAGGTACTTCTGA | |
| | | | AAGCGCTACCCCTGAGTCCGGCCCAGGT | |
| | | | ACTTCTGAAAGCGCTACTCCTGAATCCG | |
| | | | GTCCAGGTACTTCTGAAAGCGCTACCCC | |
| | | | GGAATCTGGCCCAGGTAGCGAACCGGC | |
| | | | TACTTCTGGTTCTGAAACCCCAGGTAGC | |
| | | | GAACCGGCTACCTCCGGTTCTGAAACTC | |
| | | | CAGGTAGCCCAGCAGGCTCTCCGACTTC | |
| | | | CACTGAGGAAGGTACTTCTACTGAACCT | |
| | | | TCCGAAGGCAGCGCACCAGGTACCTCT | |
| | | | ACTGAACCTTCTGAGGGCAGCGCTCCAG | |
| | | | GTAGCGAACCTGCAACCTCTGGCTCTGA | |
| | | | AACCCCAGGTACCTCTGAAAGCGCTACT | |
| | | | CCTGAATCTGGCCCAGGTACTTCTACTG | |
| | | | AACCGTCCGAGGGCAGCGCACCA | |
| AM923- | MAEPAGSPTSTEEGA | 813 | ATGGCTGAACCTGCTGGCTCTCCAACCT | 814 |
| hGH- | SPGTSSTGSPGSSTPS | | CCACTGAGGAAGGTGCATCCCCGGGCA | |
| Thrombin- | GATGSPGSSTPSGAT | | CCAGCTCTACCGGTTCTCCAGGTAGCTC | |
| AE144 | GSPGTSTEPSEGSAP | | TACCCCGTCTGGTGCTACCGGCTCTCCA | |
| | GSEPATSGSETPGSP | | GGTAGCTCTACCCCGTCTGGTGCTACTG | |
| | AGSPTSTEEGSTSST | | GCTCTCCAGGTACTTCTACTGAACCGTC | |
| | AESPGPGTSTPESGS | | TGAAGGCAGCGCACCAGGTAGCGAACC | |
| | ASPGSTSESPSGTAP | | GGCTACTTCCGGTTCTGAAACCCCAGGT | |
| | GSTSESPSGTAPGTS | | AGCCCAGCAGGTTCTCCAACTTCTACTG | |
| | TPESGSASPGTSTPES | | AAGAAGGTTCTACCAGCTCTACCGCAG | |
| | GSASPGSEPATSGSE | | AATCTCCTGGTCCAGGTACCTCTACTCC | |
| | TPGTSESATPESGPG | | GGAAAGCGGCTCTGCATCTCCAGGTTCT | |
| | SPAGSPTSTEEGTSTE | | ACTAGCGAATCTCCTTCTGGCACTGCAC | |
| | PSEGSAPGTSESATP | | CAGGTTCTACTAGCGAATCCCCGTCTGG | |
| | ESGPGTSTEPSEGSA | | TACTGCTCCAGGTACTTCTACTCCTGAA | |
| | PGTSTEPSEGSAPGSP | | AGCGGTTCCGCTTCTCCAGGTACCTCTA | |
| | AGSPTSTEEGTSTEPS | | CTCCGGAAAGCGGTTCTGCATCTCCAGG | |
| | EGSAPGTSTEPSEGS | | TAGCGAACCGGCAACCTCCGGCTCTGA | |
| | APGTSESATPESGPG | | AACCCCAGGTACCTCTGAAAGCGCTACT | |
| | TSESATPESGPGTSTE | | CCTGAATCCGGCCCAGGTAGCCCGGCA | |
| | PSEGSAPGTSTEPSE | | GGTTCTCCGACTTCCACTGAGGAAGGTA | |
| | GSAPGTSESATPESG | | CCTCTACTGAACCTTCTGAGGGCAGCGC | |
| | PGTSTEPSEGSAPGS | | TCCAGGTACTTCTGAAAGCGCTACCCCG | |
| | EPATSGSETPGSPAG | | GAGTCCGGTCCAGGTACTTCTACTGAAC | |
| | SPTSTEEGSSTPSGAT | | CGTCCGAAGGTAGCGCACCAGGTACTTC | |
| | GSPGTPGSGTASSSP | | TACCGAACCGTCCGAGGGTAGCGCACC | |
| | GSSTPSGATGSPGTS | | AGGTAGCCCAGCAGGTTCTCCTACCTCC | |
| | TEPSEGSAPGTSTEPS | | ACCGAGGAAGGTACTTCTACCGAACCG | |
| | EGSAPGSEPATSGSE | | TCCGAGGGTAGCGCACCAGGTACTTCTA | |
| | TPGSPAGSPTSTEEG | | CCGAACCTTCCGAGGGCAGCGCACCAG | |
| | SPAGSPTSTEEGTSTE | | GTACTTCTGAAAGCGCTACCCCTGAGTC | |
| | PSEGSAPGASASGAP | | CGGCCCAGGTACTTCTGAAAGCGCTACT | |
| | STGGTSESATPESGP | | CCTGAATCCGGTCCAGGTACCTCTACTG | |
| | GSPAGSPTSTEEGSP | | AACCTTCCGAAGGCAGCGCTCCAGGTA | |
| | AGSPTSTEEGSTSST | | CCTCTACCGAACCGTCCGAGGGCAGCG | |
| | AESPGPGSTSESPSGT | | CACCAGGTACTTCTGAAAGCGCAACCCC | |
| | APGTSPSGESSTAPG | | TGAATCCGGTCCAGGTACTTCTACTGAA | |
| | TPGSGTASSSPGSSTP | | CCTTCCGAAGGTAGCGCTCCAGGTAGCG | |
| | SGATGSPGSSPSAST | | AACCTGCTACTTCTGGTTCTGAAACCCC | |
| | GTGPGSEPATSGSET | | AGGTAGCCCGGCTGGCTCTCCGACCTCC | |
| | PGTSESATPESGPGS | | ACCGAGGAAGGTAGCTCTACCCCGTCTG | |
| | EPATSGSETPGSTSST | | GTGCTACTGGTTCTCCAGGTACTCCGGG | |
| | AESPGPGSTSSTAESP | | CAGCGGTACTGCTTCTTCCTCTCCAGGT | |
| | GPGTSPSGESSTAPG | | AGCTCTACCCCTTCTGGTGCTACTGGCT | |
| | SEPATSGSETPGSEP | | CTCCAGGTACCTCTACCGAACCGTCCGA | |
| | ATSGSETPGTSTEPSE | | GGGTAGCGCACCAGGTACCTCTACTGA | |
| | GSAPGSTSSTAESPG | | ACCGTCTGAGGGTAGCGCTCCAGGTAG | |
| | PGTSTPESGSASPGST | | CGAACCGGCAACCTCCGGTTCTGAAACT | |
| | SESPSGTAPGTSTEPS | | CCAGGTAGCCCTGCTGGCTCTCCGACTT | |
| | EGSAPGTSTEPSEGS | | CTACTGAGGAAGGTAGCCCGGCTGGTTC | |
| | APGTSTEPSEGSAPG | | TCCGACTTCTACTGAGGAAGGTACTTCT | |
| | SSTPSGATGSPGSSPS | | ACCGAACCTTCCGAAGGTAGCGCTCCA | |
| | ASTGTGPGASPGTSS | | GGTGCAAGCGCAAGCGGCGCGCCAAGC | |
| | TGSPGSEPATSGSET | | ACGGGAGGTACTTCTGAAAGCGCTACTC | |
| | PGTSESATPESGPGSP | | CTGAGTCCGGCCCAGGTAGCCCGGCTG | |
| | AGSPTSTEEGSSTPS | | GCTCTCCGACTTCCACCGAGGAAGGTAG | |
| | GATGSPGSSPSASTG | | CCCGGCTGGCTCTCCAACTTCTACTGAA | |
| | TGPGASPGTSSTGSP | | GAAGGTTCTACCAGCTCTACCGCTGAAT | |
| | GTSESATPESGPGTS | | CTCCTGGCCCAGGTTCTACTAGCGAATC | |
| | TEPSEGSAPGTSTEPS | | TCCGTCTGGCACCGCACCAGGTACTTCC | |
| | EGSAPGFPTIPLSRLF | | CCTAGCGGTGAATCTTCTACTGCACCAG | |
| | DNAMLRAHRLHQL | | GTACCCCTGGCAGCGGTACCGCTTCTTC | |
| | AFDTYQEFEEAYIPK | | CTCTCCAGGTAGCTCTACCCCGTCTGGT | |
| | EQKYSFLQNPQTSLC | | GCTACTGGCTCTCCAGGTTCTAGCCCGT | |
| | FSESIPTPSNREETQQ | | CTGCATCTACCGGTACCGGCCCAGGTAG | |
| | KSNLELLRISLLLIQS | | CGAACCGGCAACCTCCGGCTCTGAAACT | |
| | WLEPVQFLRSVFAN | | CCAGGTACTTCTGAAAGCGCTACTCCGG | |
| | SLVYGASDSNVYDL | | AATCCGGCCCAGGTAGCGAACCGGCTA | |
| | LKDLEEGIQTLMGRL | | CTTCCGGCTCTGAAACCCCAGGTTCCAC | |
| | EDGSPRTGQIFKQTY | | CAGCTCTACTGCAGAATCTCCGGGCCCA | |
| | SKFDTNSHNDDALL | | GGTTCTACTAGCTCTACTGCAGAATCTC | |
| | KNYGLLYCFRKDMD | | CGGGTCCAGGTACTTCTCCTAGCGGCGA | |
| | KVETFLRIVQCRSVE | | ATCTTCTACCGCTCCAGGTAGCGAACCG | |
| | GSCGFGLTPRSLLVG | | GCAACCTCTGGCTCTGAAACTCCAGGTA | |
| | GGGSEPATSGSETPG | | GCGAACCTGCAACCTCCGGCTCTGAAAC | |
| | TSESATPESGPGSEP | | CCCAGGTACTTCTACTGAACCTTCTGAG | |
| | ATSGSETPGSPAGSP | | GGCAGCGCACCAGGTTCTACCAGCTCTA | |
| | TSTEEGTSTEPSEGS | | CCGCAGAATCTCCTGGTCCAGGTACCTC | |
| | APGSEPATSGSETPG | | TACTCCGGAAAGCGGCTCTGCATCTCCA | |
| | SEPATSGSETPGSEP | | GGTTCTACTAGCGAATCTCCTTCTGGCA | |
| | ATSGSETPGTSTEPSE | | CTGCACCAGGTACTTCTACCGAACCGTC | |
| | GSAPGTSESATPESG | | CGAAGGCAGCGCTCCAGGTACCTCTACT | |
| | PGSEPATSGSETPGT | | GAACCTTCCGAGGGCAGCGCTCCAGGT | |
| | STEPSEGSAP | | ACCTCTACCGAACCTTCTGAAGGTAGCG | |
| | | | CACCAGGTAGCTCTACTCCGTCTGGTGC | |
| | | | AACCGGCTCCCCAGGTTCTAGCCCGTCT | |
| | | | GCTTCCACTGGTACTGGCCCAGGTGCTT | |
| | | | CCCCGGGCACCAGCTCTACTGGTTCTCC | |
| | | | AGGTAGCGAACCTGCTACCTCCGGTTCT | |
| | | | GAAACCCCAGGTACCTCTGAAAGCGCA | |
| | | | ACTCCGGAGTCTGGTCCAGGTAGCCCTG | |
| | | | CAGGTTCTCCTACCTCCACTGAGGAAGG | |
| | | | TAGCTCTACTCCGTCTGGTGCAACCGGC | |
| | | | TCCCCAGGTTCTAGCCCGTCTGCTTCCA | |
| | | | CTGGTACTGGCCCAGGTGCTTCCCCGGG | |
| | | | CACCAGCTCTACTGGTTCTCCAGGTACC | |
| | | | TCTGAAAGCGCTACTCCGGAGTCTGGCC | |
| | | | CAGGTACCTCTACTGAACCGTCTGAGGG | |
| | | | TAGCGCTCCAGGTACTTCTACTGAACCG | |
| | | | TCCGAAGGTAGCGCACCAGGTTTTCCGA | |
| | | | CTATTCCGCTGTCTCGTCTGTTTGATAAT | |
| | | | GCTATGCTGCGTGCGCACCGTCTGCACC | |
| | | | AGCTGGCCTTTGATACTTACCAGGAATT | |
| | | | TGAAGAAGCcTACATTCCTAAAGAGCAG | |
| | | | AAGTACTCTTTCCTGCAAAACCCACAGA | |
| | | | CTTCTCTCTGCTTCAGCGAATCTATTCCG | |
| | | | ACGCCTTCCAATCGCGAGGAAACTCAG | |
| | | | CAAAAGTCCAATCTGGAACTACTCCGCA | |
| | | | TTTCTCTGCTTCTGATTCAGAGCTGGCT | |
| | | | AGAACCAGTGCAATTTCTGCGTTCCGTC | |
| | | | TTCGCCAATAGCCTAGTTTATGGCGCAT | |
| | | | CCGACAGCAACGTATACGATCTCCTGAA | |
| | | | AGATCTCGAGGAAGGCATTCAGACCCT | |
| | | | GATGGGTCGTCTCGAGGATGGCTCTCCG | |
| | | | CGTACTGGTCAGATCTTCAAGCAGACTT | |
| | | | ACTCTAAATTTGATACTAACAGCCACAA | |
| | | | TGACGATGCGCTTCTAAAAAACTATGGT | |
| | | | CTGCTGTATTGTTTTCGTAAAGATATGG | |
| | | | ACAAAGTTGAAACCTTCCTGCGTATTGT | |
| | | | TCAGTGTCGTTCCGTTGAGGGCAGCTGT | |
| | | | GGTTTCTAAGGTctgaccccgcgcagcctgctggtgg | |
| | | | gcggcGGTGGTAGCGAACCGGCAACTTCC | |
| | | | GGCTCTGAAACCCCAGGTACTTCTGAAA | |
| | | | GCGCTACTCCTGAGTCTGGCCCAGGTAG | |
| | | | CGAACCTGCTACCTCTGGCTCTGAAACC | |
| | | | CCAGGTAGCCCGGCAGGCTCTCCGACTT | |
| | | | CCACCGAGGAAGGTACCTCTACTGAAC | |
| | | | CTTCTGAGGGTAGCGCTCCAGGTAGCGA | |
| | | | ACCGGCAACCTCTGGCTCTGAAACCCCA | |
| | | | GGTAGCGAACCTGCTACCTCCGGCTCTG | |
| | | | AAACTCCAGGTAGCGAACCGGCTACTTC | |
| | | | CGGTTCTGAAACTCCAGGTACCTCTACC | |
| | | | GAACCTTCCGAAGGCAGCGCACCAGGT | |
| | | | ACTTCTGAAAGCGCAACCCCTGAATCCG | |
| | | | GTCCAGGTAGCGAACCGGCTACTTCTGG | |
| | | | CTCTGAGACTCCAGGTACTTCTACCGAA | |
| | | | CCGTCCGAAGGTAGCGCACCA | |
| AM923- | MAEPAGSPTSTEEGA | 815 | ATGGCTGAACCTGCTGGCTCTCCAACCT | 816 |
| hGH- | SPGTSSTGSPGSSTPS | | CCACTGAGGAAGGTGCATCCCCGGGCA | |
| FXIa- | GATGSPGSSTPSGAT | | CCAGCTCTACCGGTTCTCCAGGTAGCTC | |
| AE144 | GSPGTSTEPSEGSAP | | TACCCCGTCTGGTGCTACCGGCTCTCCA | |
| | GSEPATSGSETPGSP | | GGTAGCTCTACCCCGTCTGGTGCTACTG | |
| | AGSPTSTEEGSTSST | | GCTCTCCAGGTACTTCTACTGAACCGTC | |
| | AESPGPGTSTPESGS | | TGAAGGCAGCGCACCAGGTAGCGAACC | |
| | ASPGSTSESPSGTAP | | GGCTACTTCCGGTTCTGAAACCCCAGGT | |
| | GSTSESPSGTAPGTS | | AGCCCAGCAGGTTCTCCAACTTCTACTG | |
| | TPESGSASPGTSTPES | | AAGAAGGTTCTACCAGCTCTACCGCAG | |
| | GSASPGSEPATSGSE | | AATCTCCTGGTCCAGGTACCTCTACTCC | |
| | TPGTSESATPESGPG | | GGAAAGCGGCTCTGCATCTCCAGGTTCT | |
| | SPAGSPTSTEEGTSTE | | ACTAGCGAATCTCCTTCTGGCACTGCAC | |
| | PSEGSAPGTSESATP | | CAGGTTCTACTAGCGAATCCCCGTCTGG | |
| | ESGPGTSTEPSEGSA | | TACTGCTCCAGGTACTTCTACTCCTGAA | |
| | PGTSTEPSEGSAPGSP | | AGCGGTTCCGCTTCTCCAGGTACCTCTA | |
| | AGSPTSTEEGTSTEPS | | CTCCGGAAAGCGGTTCTGCATCTCCAGG | |
| | EGSAPGTSTEPSEGS | | TAGCGAACCGGCAACCTCCGGCTCTGA | |
| | APGTSESATPESGPG | | AACCCCAGGTACCTCTGAAAGCGCTACT | |
| | TSESATPESGPGTSTE | | CCTGAATCCGGCCCAGGTAGCCCGGCA | |
| | PSEGSAPGTSTEPSE | | GGTTCTCCGACTTCCACTGAGGAAGGTA | |
| | GSAPGTSESATPESG | | CCTCTACTGAACCTTCTGAGGGCAGCGC | |
| | PGTSTEPSEGSAPGS | | TCCAGGTACTTCTGAAAGCGCTACCCCG | |
| | EPATSGSETPGSPAG | | GAGTCCGGTCCAGGTACTTCTACTGAAC | |
| | SPTSTEEGSSTPSGAT | | CGTCCGAAGGTAGCGCACCAGGTACTTC | |
| | GSPGTPGSGTASSSP | | TACCGAACCGTCCGAGGGTAGCGCACC | |
| | GSSTPSGATGSPGTS | | AGGTAGCCCAGCAGGTTCTCCTACCTCC | |
| | TEPSEGSAPGTSTEPS | | ACCGAGGAAGGTACTTCTACCGAACCG | |
| | EGSAPGSEPATSGSE | | TCCGAGGGTAGCGCACCAGGTACTTCTA | |
| | TPGSPAGSPTSTEEG | | CCGAACCTTCCGAGGGCAGCGCACCAG | |
| | SPAGSPTSTEEGTSTE | | GTACTTCTGAAAGCGCTACCCCTGAGTC | |
| | PSEGSAPGASASGAP | | CGGCCCAGGTACTTCTGAAAGCGCTACT | |
| | STGGTSESATPESGP | | CCTGAATCCGGTCCAGGTACCTCTACTG | |
| | GSPAGSPTSTEEGSP | | AACCTTCCGAAGGCAGCGCTCCAGGTA | |
| | AGSPTSTEEGSTSST | | CCTCTACCGAACCGTCCGAGGGCAGCG | |
| | AESPGPGSTSESPSGT | | CACCAGGTACTTCTGAAAGCGCAACCCC | |
| | APGTSPSGESSTAPG | | TGAATCCGGTCCAGGTACTTCTACTGAA | |
| | TPGSGTASSSPGSSTP | | CCTTCCGAAGGTAGCGCTCCAGGTAGCG | |
| | SGATGSPGSSPSAST | | AACCTGCTACTTCTGGTTCTGAAACCCC | |
| | GTGPGSEPATSGSET | | AGGTAGCCCGGCTGGCTCTCCGACCTCC | |
| | PGTSESATPESGPGS | | ACCGAGGAAGGTAGCTCTACCCCGTCTG | |
| | EPATSGSETPGSTSST | | GTGCTACTGGTTCTCCAGGTACTCCGGG | |
| | AESPGPGSTSSTAESP | | CAGCGGTACTGCTTCTTCCTCTCCAGGT | |
| | GPGTSPSGESSTAPG | | AGCTCTACCCCTTCTGGTGCTACTGGCT | |
| | SEPATSGSETPGSEP | | CTCCAGGTACCTCTACCGAACCGTCCGA | |
| | ATSGSETPGTSTEPSE | | GGGTAGCGCACCAGGTACCTCTACTGA | |
| | GSAPGSTSSTAESPG | | ACCGTCTGAGGGTAGCGCTCCAGGTAG | |
| | PGTSTPESGSASPGST | | CGAACCGGCAACCTCCGGTTCTGAAACT | |
| | SESPSGTAPGTSTEPS | | CCAGGTAGCCCTGCTGGCTCTCCGACTT | |
| | EGSAPGTSTEPSEGS | | CTACTGAGGAAGGTAGCCCGGCTGGTTC | |
| | APGTSTEPSEGSAPG | | TCCGACTTCTACTGAGGAAGGTACTTCT | |
| | SSTPSGATGSPGSSPS | | ACCGAACCTTCCGAAGGTAGCGCTCCA | |
| | ASTGTGPGASPGTSS | | GGTGCAAGCGCAAGCGGCGCGCCAAGC | |
| | TGSPGSEPATSGSET | | ACGGGAGGTACTTCTGAAAGCGCTACTC | |
| | PGTSESATPESGPGSP | | CTGAGTCCGGCCCAGGTAGCCCGGCTG | |
| | AGSPTSTEEGSSTPS | | GCTCTCCGACTTCCACCGAGGAAGGTAG | |
| | GATGSPGSSPSASTG | | CCCGGCTGGCTCTCCAACTTCTACTGAA | |
| | TGPGASPGTSSTGSP | | GAAGGTTCTACCAGCTCTACCGCTGAAT | |
| | GTSESATPESGPGTS | | CTCCTGGCCCAGGTTCTACTAGCGAATC | |
| | TEPSEGSAPGTSTEPS | | TCCGTCTGGCACCGCACCAGGTACTTCC | |
| | EGSAPGFPTIPLSRLF | | CCTAGCGGTGAATCTTCTACTGCACCAG | |
| | DNAMLRAHRLHQL | | GTACCCCTGGCAGCGGTACCGCTTCTTC | |
| | AFDTYQEFEEAYIPK | | CTCTCCAGGTAGCTCTACCCCGTCTGGT | |
| | EQKYSFLQNPQTSLC | | GCTACTGGCTCTCCAGGTTCTAGCCCGT | |
| | FSESIPTPSNREETQQ | | CTGCATCTACCGGTACCGGCCCAGGTAG | |
| | KSNLELLRISLLLIQS | | CGAACCGGCAACCTCCGGCTCTGAAACT | |
| | WLEPVQFLRSVFAN | | CCAGGTACTTCTGAAAGCGCTACTCCGG | |
| | SLVYGASDSNVYDL | | AATCCGGCCCAGGTAGCGAACCGGCTA | |
| | LKDLEEGIQTLMGRL | | CTTCCGGCTCTGAAACCCCAGGTTCCAC | |
| | EDGSPRTGQIFKQTY | | CAGCTCTACTGCAGAATCTCCGGGCCCA | |
| | SKFDTNSHNDDALL | | GGTTCTACTAGCTCTACTGCAGAATCTC | |
| | KNYGLLYCFRKDMD | | CGGGTCCAGGTACTTCTCCTAGCGGCGA | |
| | KVETFLRIVQCRSVE | | ATCTTCTACCGCTCCAGGTAGCGAACCG | |
| | GSCGFGGGKLTRVV | | GCAACCTCTGGCTCTGAAACTCCAGGTA | |
| | GGGGSEPATSGSETP | | GCGAACCTGCAACCTCCGGCTCTGAAAC | |
| | GTSESATPESGPGSE | | CCCAGGTACTTCTACTGAACCTTCTGAG | |
| | PATSGSETPGSPAGS | | GGCAGCGCACCAGGTTCTACCAGCTCTA | |
| | PTSTEEGTSTEPSEGS | | CCGCAGAATCTCCTGGTCCAGGTACCTC | |
| | APGSEPATSGSETPG | | TACTCCGGAAAGCGGCTCTGCATCTCCA | |
| | SEPATSGSETPGSEP | | GGTTCTACTAGCGAATCTCCTTCTGGCA | |
| | ATSGSETPGTSTEPSE | | CTGCACCAGGTACTTCTACCGAACCGTC | |
| | GSAPGTSESATPESG | | CGAAGGCAGCGCTCCAGGTACCTCTACT | |
| | PGSEPATSGSETPGT | | GAACCTTCCGAGGGCAGCGCTCCAGGT | |
| | STEPSEGSAP | | ACCTCTACCGAACCTTCTGAAGGTAGCG | |
| | | | CACCAGGTAGCTCTACTCCGTCTGGTGC | |
| | | | AACCGGCTCCCCAGGTTCTAGCCCGTCT | |
| | | | GCTTCCACTGGTACTGGCCCAGGTGCTT | |
| | | | CCCCGGGCACCAGCTCTACTGGTTCTCC | |
| | | | AGGTAGCGAACCTGCTACCTCCGGTTCT | |
| | | | GAAACCCCAGGTACCTCTGAAAGCGCA | |
| | | | ACTCCGGAGTCTGGTCCAGGTAGCCCTG | |
| | | | CAGGTTCTCCTACCTCCACTGAGGAAGG | |
| | | | TAGCTCTACTCCGTCTGGTGCAACCGGC | |
| | | | TCCCCAGGTTCTAGCCCGTCTGCTTCCA | |
| | | | CTGGTACTGGCCCAGGTGCTTCCCCGGG | |
| | | | CACCAGCTCTACTGGTTCTCCAGGTACC | |
| | | | TCTGAAAGCGCTACTCCGGAGTCTGGCC | |
| | | | CAGGTACCTCTACTGAACCGTCTGAGGG | |
| | | | TAGCGCTCCAGGTACTTCTACTGAACCG | |
| | | | TCCGAAGGTAGCGCACCAGGTTTTCCGA | |
| | | | CTATTCCGCTGTCTCGTCTGTTTGATAAT | |
| | | | GCTATGCTGCGTGCGCACCGTCTGCACC | |
| | | | AGCTGGCCTTTGATACTTACCAGGAATT | |
| | | | TGAAGAAGCcTACATTCCTAAAGAGCAG | |
| | | | AAGTACTCTTTCCTGCAAAACCCACAGA | |
| | | | CTTCTCTCTGCTTCAGCGAATCTATTCCG | |
| | | | ACGCCTTCCAATCGCGAGGAAACTCAG | |
| | | | CAAAAGTCCAATCTGGAACTACTCCGCA | |
| | | | TTTCTCTGCTTCTGATTCAGAGCTGGCT | |
| | | | AGAACCAGTGCAATTTCTGCGTTCCGTC | |
| | | | TTCGCCAATAGCCTAGTTTATGGCGCAT | |
| | | | CCGACAGCAACGTATACGATCTCCTGAA | |
| | | | AGATCTCGAGGAAGGCATTCAGACCCT | |
| | | | GATGGGTCGTCTCGAGGATGGCTCTCCG | |
| | | | CGTACTGGTCAGATCTTCAAGCAGACTT | |
| | | | ACTCTAAATTTGATACTAACAGCCACAA | |
| | | | TGACGATGCGCTTCTAAAAAACTATGGT | |
| | | | CTGCTGTATTGTTTTCGTAAAGATATGG | |
| | | | ACAAAGTTGAAACCTTCCTGCGTATTGT | |
| | | | TCAGTGTCGTTCCGTTGAGGGCAGCTGT | |
| | | | GGTTTCTAAGGTggcggcaaactgacccgcgtggtg | |
| | | | ggcggcGGTGGTAGCGAACCGGCAACTTC | |
| | | | CGGCTCTGAAACCCCAGGTACTTCTGAA | |
| | | | AGCGCTACTCCTGAGTCTGGCCCAGGTA | |
| | | | GCGAACCTGCTACCTCTGGCTCTGAAAC | |
| | | | CCCAGGTAGCCCGGCAGGCTCTCCGACT | |
| | | | TCCACCGAGGAAGGTACCTCTACTGAAC | |
| | | | CTTCTGAGGGTAGCGCTCCAGGTAGCGA | |
| | | | ACCGGCAACCTCTGGCTCTGAAACCCCA | |
| | | | GGTAGCGAACCTGCTACCTCCGGCTCTG | |
| | | | AAACTCCAGGTAGCGAACCGGCTACTTC | |
| | | | CGGTTCTGAAACTCCAGGTACCTCTACC | |
| | | | GAACCTTCCGAAGGCAGCGCACCAGGT | |
| | | | ACTTCTGAAAGCGCAACCCCTGAATCCG | |
| | | | GTCCAGGTAGCGAACCGGCTACTTCTGG | |
| | | | CTCTGAGACTCCAGGTACTTCTACCGAA | |
| | | | CCGTCCGAAGGTAGCGCACCA | |
| AM923- | MAEPAGSPTSTEEGA | 817 | ATGGCTGAACCTGCTGGCTCTCCAACCT | 818 |
| hGH- | SPGTSSTGSPGSSTPS | | CCACTGAGGAAGGTGCATCCCCGGGCA | |
| Elastase- | GATGSPGSSTPSGAT | | CCAGCTCTACCGGTTCTCCAGGTAGCTC | |
| AE144 | GSPGTSTEPSEGSAP | | TACCCCGTCTGGTGCTACCGGCTCTCCA | |
| | GSEPATSGSETPGSP | | GGTAGCTCTACCCCGTCTGGTGCTACTG | |
| | AGSPTSTEEGSTSST | | GCTCTCCAGGTACTTCTACTGAACCGTC | |
| | AESPGPGTSTPESGS | | TGAAGGCAGCGCACCAGGTAGCGAACC | |
| | ASPGSTSESPSGTAP | | GGCTACTTCCGGTTCTGAAACCCCAGGT | |
| | GSTSESPSGTAPGTS | | AGCCCAGCAGGTTCTCCAACTTCTACTG | |
| | TPESGSASPGTSTPES | | AAGAAGGTTCTACCAGCTCTACCGCAG | |
| | GSASPGSEPATSGSE | | AATCTCCTGGTCCAGGTACCTCTACTCC | |
| | TPGTSESATPESGPG | | GGAAAGCGGCTCTGCATCTCCAGGTTCT | |
| | SPAGSPTSTEEGTSTE | | ACTAGCGAATCTCCTTCTGGCACTGCAC | |
| | PSEGSAPGTSESATP | | CAGGTTCTACTAGCGAATCCCCGTCTGG | |
| | ESGPGTSTEPSEGSA | | TACTGCTCCAGGTACTTCTACTCCTGAA | |
| | PGTSTEPSEGSAPGSP | | AGCGGTTCCGCTTCTCCAGGTACCTCTA | |
| | AGSPTSTEEGTSTEPS | | CTCCGGAAAGCGGTTCTGCATCTCCAGG | |
| | EGSAPGTSTEPSEGS | | TAGCGAACCGGCAACCTCCGGCTCTGA | |
| | APGTSESATPESGPG | | AACCCCAGGTACCTCTGAAAGCGCTACT | |
| | TSESATPESGPGTSTE | | CCTGAATCCGGCCCAGGTAGCCCGGCA | |
| | PSEGSAPGTSTEPSE | | GGTTCTCCGACTTCCACTGAGGAAGGTA | |
| | GSAPGTSESATPESG | | CCTCTACTGAACCTTCTGAGGGCAGCGC | |
| | PGTSTEPSEGSAPGS | | TCCAGGTACTTCTGAAAGCGCTACCCCG | |
| | EPATSGSETPGSPAG | | GAGTCCGGTCCAGGTACTTCTACTGAAC | |
| | SPTSTEEGSSTPSGAT | | CGTCCGAAGGTAGCGCACCAGGTACTTC | |
| | GSPGTPGSGTASSSP | | TACCGAACCGTCCGAGGGTAGCGCACC | |
| | GSSTPSGATGSPGTS | | AGGTAGCCCAGCAGGTTCTCCTACCTCC | |
| | TEPSEGSAPGTSTEPS | | ACCGAGGAAGGTACTTCTACCGAACCG | |
| | EGSAPGSEPATSGSE | | TCCGAGGGTAGCGCACCAGGTACTTCTA | |
| | TPGSPAGSPTSTEEG | | CCGAACCTTCCGAGGGCAGCGCACCAG | |
| | SPAGSPTSTEEGTSTE | | GTACTTCTGAAAGCGCTACCCCTGAGTC | |
| | PSEGSAPGASASGAP | | CGGCCCAGGTACTTCTGAAAGCGCTACT | |
| | STGGTSESATPESGP | | CCTGAATCCGGTCCAGGTACCTCTACTG | |
| | GSPAGSPTSTEEGSP | | AACCTTCCGAAGGCAGCGCTCCAGGTA | |
| | AGSPTSTEEGSTSST | | CCTCTACCGAACCGTCCGAGGGCAGCG | |
| | AESPGPGSTSESPSGT | | CACCAGGTACTTCTGAAAGCGCAACCCC | |
| | APGTSPSGESSTAPG | | TGAATCCGGTCCAGGTACTTCTACTGAA | |
| | TPGSGTASSSPGSSTP | | CCTTCCGAAGGTAGCGCTCCAGGTAGCG | |
| | SGATGSPGSSPSAST | | AACCTGCTACTTCTGGTTCTGAAACCCC | |
| | GTGPGSEPATSGSET | | AGGTAGCCCGGCTGGCTCTCCGACCTCC | |
| | PGTSESATPESGPGS | | ACCGAGGAAGGTAGCTCTACCCCGTCTG | |
| | EPATSGSETPGSTSST | | GTGCTACTGGTTCTCCAGGTACTCCGGG | |
| | AESPGPGSTSSTAESP | | CAGCGGTACTGCTTCTTCCTCTCCAGGT | |
| | GPGTSPSGESSTAPG | | AGCTCTACCCCTTCTGGTGCTACTGGCT | |
| | SEPATSGSETPGSEP | | CTCCAGGTACCTCTACCGAACCGTCCGA | |
| | ATSGSETPGTSTEPSE | | GGGTAGCGCACCAGGTACCTCTACTGA | |
| | GSAPGSTSSTAESPG | | ACCGTCTGAGGGTAGCGCTCCAGGTAG | |
| | PGTSTPESGSASPGST | | CGAACCGGCAACCTCCGGTTCTGAAACT | |
| | SESPSGTAPGTSTEPS | | CCAGGTAGCCCTGCTGGCTCTCCGACTT | |
| | EGSAPGTSTEPSEGS | | CTACTGAGGAAGGTAGCCCGGCTGGTTC | |
| | APGTSTEPSEGSAPG | | TCCGACTTCTACTGAGGAAGGTACTTCT | |
| | SSTPSGATGSPGSSPS | | ACCGAACCTTCCGAAGGTAGCGCTCCA | |
| | ASTGTGPGASPGTSS | | GGTGCAAGCGCAAGCGGCGCGCCAAGC | |
| | TGSPGSEPATSGSET | | ACGGGAGGTACTTCTGAAAGCGCTACTC | |
| | PGTSESATPESGPGSP | | CTGAGTCCGGCCCAGGTAGCCCGGCTG | |
| | AGSPTSTEEGSSTPS | | GCTCTCCGACTTCCACCGAGGAAGGTAG | |
| | GATGSPGSSPSASTG | | CCCGGCTGGCTCTCCAACTTCTACTGAA | |
| | TGPGASPGTSSTGSP | | GAAGGTTCTACCAGCTCTACCGCTGAAT | |
| | GTSESATPESGPGTS | | CTCCTGGCCCAGGTTCTACTAGCGAATC | |
| | TEPSEGSAPGTSTEPS | | TCCGTCTGGCACCGCACCAGGTACTTCC | |
| | EGSAPGFPTIPLSRLF | | CCTAGCGGTGAATCTTCTACTGCACCAG | |
| | DNAMLRAHRLHQL | | GTACCCCTGGCAGCGGTACCGCTTCTTC | |
| | AFDTYQEFEEAYIPK | | CTCTCCAGGTAGCTCTACCCCGTCTGGT | |
| | EQKYSFLQNPQTSLC | | GCTACTGGCTCTCCAGGTTCTAGCCCGT | |
| | FSESIPTPSNREETQQ | | CTGCATCTACCGGTACCGGCCCAGGTAG | |
| | KSNLELLRISLLLIQS | | CGAACCGGCAACCTCCGGCTCTGAAACT | |
| | WLEPVQFLRSVFAN | | CCAGGTACTTCTGAAAGCGCTACTCCGG | |
| | SLVYGASDSNVYDL | | AATCCGGCCCAGGTAGCGAACCGGCTA | |
| | LKDLEEGIQTLMGRL | | CTTCCGGCTCTGAAACCCCAGGTTCCAC | |
| | EDGSPRTGQIFKQTY | | CAGCTCTACTGCAGAATCTCCGGGCCCA | |
| | SKFDTNSHNDDALL | | GGTTCTACTAGCTCTACTGCAGAATCTC | |
| | KNYGLLYCFRKDMD | | CGGGTCCAGGTACTTCTCCTAGCGGCGA | |
| | KVETFLRIVQCRSVE | | ATCTTCTACCGCTCCAGGTAGCGAACCG | |
| | GSCGFGGGLGPVSG | | GCAACCTCTGGCTCTGAAACTCCAGGTA | |
| | VPGGSEPATSGSETP | | GCGAACCTGCAACCTCCGGCTCTGAAAC | |
| | GTSESATPESGPGSE | | CCCAGGTACTTCTACTGAACCTTCTGAG | |
| | PATSGSETPGSPAGS | | GGCAGCGCACCAGGTTCTACCAGCTCTA | |
| | PTSTEEGTSTEPSEGS | | CCGCAGAATCTCCTGGTCCAGGTACCTC | |
| | APGSEPATSGSETPG | | TACTCCGGAAAGCGGCTCTGCATCTCCA | |
| | SEPATSGSETPGSEP | | GGTTCTACTAGCGAATCTCCTTCTGGCA | |
| | ATSGSETPGTSTEPSE | | CTGCACCAGGTACTTCTACCGAACCGTC | |
| | GSAPGTSESATPESG | | CGAAGGCAGCGCTCCAGGTACCTCTACT | |
| | PGSEPATSGSETPGT | | GAACCTTCCGAGGGCAGCGCTCCAGGT | |
| | STEPSEGSAP | | ACCTCTACCGAACCTTCTGAAGGTAGCG | |
| | | | CACCAGGTAGCTCTACTCCGTCTGGTGC | |
| | | | AACCGGCTCCCCAGGTTCTAGCCCGTCT | |
| | | | GCTTCCACTGGTACTGGCCCAGGTGCTT | |
| | | | CCCCGGGCACCAGCTCTACTGGTTCTCC | |
| | | | AGGTAGCGAACCTGCTACCTCCGGTTCT | |
| | | | GAAACCCCAGGTACCTCTGAAAGCGCA | |
| | | | ACTCCGGAGTCTGGTCCAGGTAGCCCTG | |
| | | | CAGGTTCTCCTACCTCCACTGAGGAAGG | |
| | | | TAGCTCTACTCCGTCTGGTGCAACCGGC | |
| | | | TCCCCAGGTTCTAGCCCGTCTGCTTCCA | |
| | | | CTGGTACTGGCCCAGGTGCTTCCCCGGG | |
| | | | CACCAGCTCTACTGGTTCTCCAGGTACC | |
| | | | TCTGAAAGCGCTACTCCGGAGTCTGGCC | |
| | | | CAGGTACCTCTACTGAACCGTCTGAGGG | |
| | | | TAGCGCTCCAGGTACTTCTACTGAACCG | |
| | | | TCCGAAGGTAGCGCACCAGGTTTTCCGA | |
| | | | CTATTCCGCTGTCTCGTCTGTTTGATAAT | |
| | | | GCTATGCTGCGTGCGCACCGTCTGCACC | |
| | | | AGCTGGCCTTTGATACTTACCAGGAATT | |
| | | | TGAAGAAGCcTACATTCCTAAAGAGCAG | |
| | | | AAGTACTCTTTCCTGCAAAACCCACAGA | |
| | | | CTTCTCTCTGCTTCAGCGAATCTATTCCG | |
| | | | ACGCCTTCCAATCGCGAGGAAACTCAG | |
| | | | CAAAAGTCCAATCTGGAACTACTCCGCA | |
| | | | TTTCTCTGCTTCTGATTCAGAGCTGGCT | |
| | | | AGAACCAGTGCAATTTCTGCGTTCCGTC | |
| | | | TTCGCCAATAGCCTAGTTTATGGCGCAT | |
| | | | CCGACAGCAACGTATACGATCTCCTGAA | |
| | | | AGATCTCGAGGAAGGCATTCAGACCCT | |
| | | | GATGGGTCGTCTCGAGGATGGCTCTCCG | |
| | | | CGTACTGGTCAGATCTTCAAGCAGACTT | |
| | | | ACTCTAAATTTGATACTAACAGCCACAA | |
| | | | TGACGATGCGCTTCTAAAAAACTATGGT | |
| | | | CTGCTGTATTGTTTTCGTAAAGATATGG | |
| | | | ACAAAGTTGAAACCTTCCTGCGTATTGT | |
| | | | TCAGTGTCGTTCCGTTGAGGGCAGCTGT | |
| | | | GGTTTCTAAGGTggcggcctgggcccggtgagcggc | |
| | | | gtgccgGGTGGTAGCGAACCGGCAACTTCC | |
| | | | GGCTCTGAAACCCCAGGTACTTCTGAAA | |
| | | | GCGCTACTCCTGAGTCTGGCCCAGGTAG | |
| | | | CGAACCTGCTACCTCTGGCTCTGAAACC | |
| | | | CCAGGTAGCCCGGCAGGCTCTCCGACTT | |
| | | | CCACCGAGGAAGGTACCTCTACTGAAC | |
| | | | CTTCTGAGGGTAGCGCTCCAGGTAGCGA | |
| | | | ACCGGCAACCTCTGGCTCTGAAACCCCA | |
| | | | GGTAGCGAACCTGCTACCTCCGGCTCTG | |
| | | | AAACTCCAGGTAGCGAACCGGCTACTTC | |
| | | | CGGTTCTGAAACTCCAGGTACCTCTACC | |
| | | | GAACCTTCCGAAGGCAGCGCACCAGGT | |
| | | | ACTTCTGAAAGCGCAACCCCTGAATCCG | |
| | | | GTCCAGGTAGCGAACCGGCTACTTCTGG | |
| | | | CTCTGAGACTCCAGGTACTTCTACCGAA | |
| | | | CCGTCCGAAGGTAGCGCACCA | |
| AM923- | MAEPAGSPTSTEEGA | 819 | ATGGCTGAACCTGCTGGCTCTCCAACCT | 820 |
| hGH- | SPGTSSTGSPGSSTPS | | CCACTGAGGAAGGTGCATCCCCGGGCA | |
| MMP-17- | GATGSPGSSTPSGAT | | CCAGCTCTACCGGTTCTCCAGGTAGCTC | |
| AE144 | GSPGTSTEPSEGSAP | | TACCCCGTCTGGTGCTACCGGCTCTCCA | |
| | GSEPATSGSETPGSP | | GGTAGCTCTACCCCGTCTGGTGCTACTG | |
| | AGSPTSTEEGSTSST | | GCTCTCCAGGTACTTCTACTGAACCGTC | |
| | AESPGPGTSTPESGS | | TGAAGGCAGCGCACCAGGTAGCGAACC | |
| | ASPGSTSESPSGTAP | | GGCTACTTCCGGTTCTGAAACCCCAGGT | |
| | GSTSESPSGTAPGTS | | AGCCCAGCAGGTTCTCCAACTTCTACTG | |
| | TPESGSASPGTSTPES | | AAGAAGGTTCTACCAGCTCTACCGCAG | |
| | GSASPGSEPATSGSE | | AATCTCCTGGTCCAGGTACCTCTACTCC | |
| | TPGTSESATPESGPG | | GGAAAGCGGCTCTGCATCTCCAGGTTCT | |
| | SPAGSPTSTEEGTSTE | | ACTAGCGAATCTCCTTCTGGCACTGCAC | |
| | PSEGSAPGTSESATP | | CAGGTTCTACTAGCGAATCCCCGTCTGG | |
| | ESGPGTSTEPSEGSA | | TACTGCTCCAGGTACTTCTACTCCTGAA | |
| | PGTSTEPSEGSAPGSP | | AGCGGTTCCGCTTCTCCAGGTACCTCTA | |
| | AGSPTSTEEGTSTEPS | | CTCCGGAAAGCGGTTCTGCATCTCCAGG | |
| | EGSAPGTSTEPSEGS | | TAGCGAACCGGCAACCTCCGGCTCTGA | |
| | APGTSESATPESGPG | | AACCCCAGGTACCTCTGAAAGCGCTACT | |
| | TSESATPESGPGTSTE | | CCTGAATCCGGCCCAGGTAGCCCGGCA | |
| | PSEGSAPGTSTEPSE | | GGTTCTCCGACTTCCACTGAGGAAGGTA | |
| | GSAPGTSESATPESG | | CCTCTACTGAACCTTCTGAGGGCAGCGC | |
| | PGTSTEPSEGSAPGS | | TCCAGGTACTTCTGAAAGCGCTACCCCG | |
| | EPATSGSETPGSPAG | | GAGTCCGGTCCAGGTACTTCTACTGAAC | |
| | SPTSTEEGSSTPSGAT | | CGTCCGAAGGTAGCGCACCAGGTACTTC | |
| | GSPGTPGSGTASSSP | | TACCGAACCGTCCGAGGGTAGCGCACC | |
| | GSSTPSGATGSPGTS | | AGGTAGCCCAGCAGGTTCTCCTACCTCC | |
| | TEPSEGSAPGTSTEPS | | ACCGAGGAAGGTACTTCTACCGAACCG | |
| | EGSAPGSEPATSGSE | | TCCGAGGGTAGCGCACCAGGTACTTCTA | |
| | TPGSPAGSPTSTEEG | | CCGAACCTTCCGAGGGCAGCGCACCAG | |
| | SPAGSPTSTEEGTSTE | | GTACTTCTGAAAGCGCTACCCCTGAGTC | |
| | PSEGSAPGASASGAP | | CGGCCCAGGTACTTCTGAAAGCGCTACT | |
| | STGGTSESATPESGP | | CCTGAATCCGGTCCAGGTACCTCTACTG | |
| | GSPAGSPTSTEEGSP | | AACCTTCCGAAGGCAGCGCTCCAGGTA | |
| | AGSPTSTEEGSTSST | | CCTCTACCGAACCGTCCGAGGGCAGCG | |
| | AESPGPGSTSESPSGT | | CACCAGGTACTTCTGAAAGCGCAACCCC | |
| | APGTSPSGESSTAPG | | TGAATCCGGTCCAGGTACTTCTACTGAA | |
| | TPGSGTASSSPGSSTP | | CCTTCCGAAGGTAGCGCTCCAGGTAGCG | |
| | SGATGSPGSSPSAST | | AACCTGCTACTTCTGGTTCTGAAACCCC | |
| | GTGPGSEPATSGSET | | AGGTAGCCCGGCTGGCTCTCCGACCTCC | |
| | PGTSESATPESGPGS | | ACCGAGGAAGGTAGCTCTACCCCGTCTG | |
| | EPATSGSETPGSTSST | | GTGCTACTGGTTCTCCAGGTACTCCGGG | |
| | AESPGPGSTSSTAESP | | CAGCGGTACTGCTTCTTCCTCTCCAGGT | |
| | GPGTSPSGESSTAPG | | AGCTCTACCCCTTCTGGTGCTACTGGCT | |
| | SEPATSGSETPGSEP | | CTCCAGGTACCTCTACCGAACCGTCCGA | |
| | ATSGSETPGTSTEPSE | | GGGTAGCGCACCAGGTACCTCTACTGA | |
| | GSAPGSTSSTAESPG | | ACCGTCTGAGGGTAGCGCTCCAGGTAG | |
| | PGTSTPESGSASPGST | | CGAACCGGCAACCTCCGGTTCTGAAACT | |
| | SESPSGTAPGTSTEPS | | CCAGGTAGCCCTGCTGGCTCTCCGACTT | |
| | EGSAPGTSTEPSEGS | | CTACTGAGGAAGGTAGCCCGGCTGGTTC | |
| | APGTSTEPSEGSAPG | | TCCGACTTCTACTGAGGAAGGTACTTCT | |
| | SSTPSGATGSPGSSPS | | ACCGAACCTTCCGAAGGTAGCGCTCCA | |
| | ASTGTGPGASPGTSS | | GGTGCAAGCGCAAGCGGCGCGCCAAGC | |
| | TGSPGSEPATSGSET | | ACGGGAGGTACTTCTGAAAGCGCTACTC | |
| | PGTSESATPESGPGSP | | CTGAGTCCGGCCCAGGTAGCCCGGCTG | |
| | AGSPTSTEEGSSTPS | | GCTCTCCGACTTCCACCGAGGAAGGTAG | |
| | GATGSPGSSPSASTG | | CCCGGCTGGCTCTCCAACTTCTACTGAA | |
| | TGPGASPGTSSTGSP | | GAAGGTTCTACCAGCTCTACCGCTGAAT | |
| | GTSESATPESGPGTS | | CTCCTGGCCCAGGTTCTACTAGCGAATC | |
| | TEPSEGSAPGTSTEPS | | TCCGTCTGGCACCGCACCAGGTACTTCC | |
| | EGSAPGFPTIPLSRLF | | CCTAGCGGTGAATCTTCTACTGCACCAG | |
| | DNAMLRAHRLHQL | | GTACCCCTGGCAGCGGTACCGCTTCTTC | |
| | AFDTYQEFEEAYIPK | | CTCTCCAGGTAGCTCTACCCCGTCTGGT | |
| | EQKYSFLQNPQTSLC | | GCTACTGGCTCTCCAGGTTCTAGCCCGT | |
| | FSESIPTPSNREETQQ | | CTGCATCTACCGGTACCGGCCCAGGTAG | |
| | KSNLELLRISLLLIQS | | CGAACCGGCAACCTCCGGCTCTGAAACT | |
| | WLEPVQFLRSVFAN | | CCAGGTACTTCTGAAAGCGCTACTCCGG | |
| | SLVYGASDSNVYDL | | AATCCGGCCCAGGTAGCGAACCGGCTA | |
| | LKDLEEGIQTLMGRL | | CTTCCGGCTCTGAAACCCCAGGTTCCAC | |
| | EDGSPRTGQIFKQTY | | CAGCTCTACTGCAGAATCTCCGGGCCCA | |
| | SKFDTNSHNDDALL | | GGTTCTACTAGCTCTACTGCAGAATCTC | |
| | KNYGLLYCFRKDMD | | CGGGTCCAGGTACTTCTCCTAGCGGCGA | |
| | KVETFLRIVQCRSVE | | ATCTTCTACCGCTCCAGGTAGCGAACCG | |
| | GSCGFGAPLGLRLR | | GCAACCTCTGGCTCTGAAACTCCAGGTA | |
| | GGGGSEPATSGSETP | | GCGAACCTGCAACCTCCGGCTCTGAAAC | |
| | GTSESATPESGPGSE | | CCCAGGTACTTCTACTGAACCTTCTGAG | |
| | PATSGSETPGSPAGS | | GGCAGCGCACCAGGTTCTACCAGCTCTA | |
| | PTSTEEGTSTEPSEGS | | CCGCAGAATCTCCTGGTCCAGGTACCTC | |
| | APGSEPATSGSETPG | | TACTCCGGAAAGCGGCTCTGCATCTCCA | |
| | SEPATSGSETPGSEP | | GGTTCTACTAGCGAATCTCCTTCTGGCA | |
| | ATSGSETPGTSTEPSE | | CTGCACCAGGTACTTCTACCGAACCGTC | |
| | GSAPGTSESATPESG | | CGAAGGCAGCGCTCCAGGTACCTCTACT | |
| | PGSEPATSGSETPGT | | GAACCTTCCGAGGGCAGCGCTCCAGGT | |
| | STEPSEGSAP | | ACCTCTACCGAACCTTCTGAAGGTAGCG | |
| | | | CACCAGGTAGCTCTACTCCGTCTGGTGC | |
| | | | AACCGGCTCCCCAGGTTCTAGCCCGTCT | |
| | | | GCTTCCACTGGTACTGGCCCAGGTGCTT | |
| | | | CCCCGGGCACCAGCTCTACTGGTTCTCC | |
| | | | AGGTAGCGAACCTGCTACCTCCGGTTCT | |
| | | | GAAACCCCAGGTACCTCTGAAAGCGCA | |
| | | | ACTCCGGAGTCTGGTCCAGGTAGCCCTG | |
| | | | CAGGTTCTCCTACCTCCACTGAGGAAGG | |
| | | | TAGCTCTACTCCGTCTGGTGCAACCGGC | |
| | | | TCCCCAGGTTCTAGCCCGTCTGCTTCCA | |
| | | | CTGGTACTGGCCCAGGTGCTTCCCCGGG | |
| | | | CACCAGCTCTACTGGTTCTCCAGGTACC | |
| | | | TCTGAAAGCGCTACTCCGGAGTCTGGCC | |
| | | | CAGGTACCTCTACTGAACCGTCTGAGGG | |
| | | | TAGCGCTCCAGGTACTTCTACTGAACCG | |
| | | | TCCGAAGGTAGCGCACCAGGTTTTCCGA | |
| | | | CTATTCCGCTGTCTCGTCTGTTTGATAAT | |
| | | | GCTATGCTGCGTGCGCACCGTCTGCACC | |
| | | | AGCTGGCCTTTGATACTTACCAGGAATT | |
| | | | TGAAGAAGCcTACATTCCTAAAGAGCAG | |
| | | | AAGTACTCTTTCCTGCAAAACCCACAGA | |
| | | | CTTCTCTCTGCTTCAGCGAATCTATTCCG | |
| | | | ACGCCTTCCAATCGCGAGGAAACTCAG | |
| | | | CAAAAGTCCAATCTGGAACTACTCCGCA | |
| | | | TTTCTCTGCTTCTGATTCAGAGCTGGCT | |
| | | | AGAACCAGTGCAATTTCTGCGTTCCGTC | |
| | | | TTCGCCAATAGCCTAGTTTATGGCGCAT | |
| | | | CCGACAGCAACGTATACGATCTCCTGAA | |
| | | | AGATCTCGAGGAAGGCATTCAGACCCT | |
| | | | GATGGGTCGTCTCGAGGATGGCTCTCCG | |
| | | | CGTACTGGTCAGATCTTCAAGCAGACTT | |
| | | | ACTCTAAATTTGATACTAACAGCCACAA | |
| | | | TGACGATGCGCTTCTAAAAAACTATGGT | |
| | | | CTGCTGTATTGTTTTCGTAAAGATATGG | |
| | | | ACAAAGTTGAAACCTTCCTGCGTATTGT | |
| | | | TCAGTGTCGTTCCGTTGAGGGCAGCTGT | |
| | | | GGTTTCTAAGGTgcgccgctgggcctgcgcctgcgc | |
| | | | ggcggcGGTGGTAGCGAACCGGCAACTTC | |
| | | | CGGCTCTGAAACCCCAGGTACTTCTGAA | |
| | | | AGCGCTACTCCTGAGTCTGGCCCAGGTA | |
| | | | GCGAACCTGCTACCTCTGGCTCTGAAAC | |
| | | | CCCAGGTAGCCCGGCAGGCTCTCCGACT | |
| | | | TCCACCGAGGAAGGTACCTCTACTGAAC | |
| | | | CTTCTGAGGGTAGCGCTCCAGGTAGCGA | |
| | | | ACCGGCAACCTCTGGCTCTGAAACCCCA | |
| | | | GGTAGCGAACCTGCTACCTCCGGCTCTG | |
| | | | AAACTCCAGGTAGCGAACCGGCTACTTC | |
| | | | CGGTTCTGAAACTCCAGGTACCTCTACC | |
| | | | GAACCTTCCGAAGGCAGCGCACCAGGT | |
| | | | ACTTCTGAAAGCGCAACCCCTGAATCCG | |
| | | | GTCCAGGTAGCGAACCGGCTACTTCTGG | |
| | | | CTCTGAGACTCCAGGTACTTCTACCGAA | |
| | | | CCGTCCGAAGGTAGCGCACCA | |
| AM923- | MAEPAGSPTSTEEGA | 821 | ATGGCTGAACCTGCTGGCTCTCCAACCT | 822 |
| hGH- | SPGTSSTGSPGSSTPS | | CCACTGAGGAAGGTGCATCCCCGGGCA | |
| Thrombin- | GATGSPGSSTPSGAT | | CCAGCTCTACCGGTTCTCCAGGTAGCTC | |
| AE288 | GSPGTSTEPSEGSAP | | TACCCCGTCTGGTGCTACCGGCTCTCCA | |
| | GSEPATSGSETPGSP | | GGTAGCTCTACCCCGTCTGGTGCTACTG | |
| | AGSPTSTEEGSTSST | | GCTCTCCAGGTACTTCTACTGAACCGTC | |
| | AESPGPGTSTPESGS | | TGAAGGCAGCGCACCAGGTAGCGAACC | |
| | ASPGSTSESPSGTAP | | GGCTACTTCCGGTTCTGAAACCCCAGGT | |
| | GSTSESPSGTAPGTS | | AGCCCAGCAGGTTCTCCAACTTCTACTG | |
| | TPESGSASPGTSTPES | | AAGAAGGTTCTACCAGCTCTACCGCAG | |
| | GSASPGSEPATSGSE | | AATCTCCTGGTCCAGGTACCTCTACTCC | |
| | TPGTSESATPESGPG | | GGAAAGCGGCTCTGCATCTCCAGGTTCT | |
| | SPAGSPTSTEEGTSTE | | ACTAGCGAATCTCCTTCTGGCACTGCAC | |
| | PSEGSAPGTSESATP | | CAGGTTCTACTAGCGAATCCCCGTCTGG | |
| | ESGPGTSTEPSEGSA | | TACTGCTCCAGGTACTTCTACTCCTGAA | |
| | PGTSTEPSEGSAPGSP | | AGCGGTTCCGCTTCTCCAGGTACCTCTA | |
| | AGSPTSTEEGTSTEPS | | CTCCGGAAAGCGGTTCTGCATCTCCAGG | |
| | EGSAPGTSTEPSEGS | | TAGCGAACCGGCAACCTCCGGCTCTGA | |
| | APGTSESATPESGPG | | AACCCCAGGTACCTCTGAAAGCGCTACT | |
| | TSESATPESGPGTSTE | | CCTGAATCCGGCCCAGGTAGCCCGGCA | |
| | PSEGSAPGTSTEPSE | | GGTTCTCCGACTTCCACTGAGGAAGGTA | |
| | GSAPGTSESATPESG | | CCTCTACTGAACCTTCTGAGGGCAGCGC | |
| | PGTSTEPSEGSAPGS | | TCCAGGTACTTCTGAAAGCGCTACCCCG | |
| | EPATSGSETPGSPAG | | GAGTCCGGTCCAGGTACTTCTACTGAAC | |
| | SPTSTEEGSSTPSGAT | | CGTCCGAAGGTAGCGCACCAGGTACTTC | |
| | GSPGTPGSGTASSSP | | TACCGAACCGTCCGAGGGTAGCGCACC | |
| | GSSTPSGATGSPGTS | | AGGTAGCCCAGCAGGTTCTCCTACCTCC | |
| | TEPSEGSAPGTSTEPS | | ACCGAGGAAGGTACTTCTACCGAACCG | |
| | EGSAPGSEPATSGSE | | TCCGAGGGTAGCGCACCAGGTACTTCTA | |
| | TPGSPAGSPTSTEEG | | CCGAACCTTCCGAGGGCAGCGCACCAG | |
| | SPAGSPTSTEEGTSTE | | GTACTTCTGAAAGCGCTACCCCTGAGTC | |
| | PSEGSAPGASASGAP | | CGGCCCAGGTACTTCTGAAAGCGCTACT | |
| | STGGTSESATPESGP | | CCTGAATCCGGTCCAGGTACCTCTACTG | |
| | GSPAGSPTSTEEGSP | | AACCTTCCGAAGGCAGCGCTCCAGGTA | |
| | AGSPTSTEEGSTSST | | CCTCTACCGAACCGTCCGAGGGCAGCG | |
| | AESPGPGSTSESPSGT | | CACCAGGTACTTCTGAAAGCGCAACCCC | |
| | APGTSPSGESSTAPG | | TGAATCCGGTCCAGGTACTTCTACTGAA | |
| | TPGSGTASSSPGSSTP | | CCTTCCGAAGGTAGCGCTCCAGGTAGCG | |
| | SGATGSPGSSPSAST | | AACCTGCTACTTCTGGTTCTGAAACCCC | |
| | GTGPGSEPATSGSET | | AGGTAGCCCGGCTGGCTCTCCGACCTCC | |
| | PGTSESATPESGPGS | | ACCGAGGAAGGTAGCTCTACCCCGTCTG | |
| | EPATSGSETPGSTSST | | GTGCTACTGGTTCTCCAGGTACTCCGGG | |
| | AESPGPGSTSSTAESP | | CAGCGGTACTGCTTCTTCCTCTCCAGGT | |
| | GPGTSPSGESSTAPG | | AGCTCTACCCCTTCTGGTGCTACTGGCT | |
| | SEPATSGSETPGSEP | | CTCCAGGTACCTCTACCGAACCGTCCGA | |
| | ATSGSETPGTSTEPSE | | GGGTAGCGCACCAGGTACCTCTACTGA | |
| | GSAPGSTSSTAESPG | | ACCGTCTGAGGGTAGCGCTCCAGGTAG | |
| | PGTSTPESGSASPGST | | CGAACCGGCAACCTCCGGTTCTGAAACT | |
| | SESPSGTAPGTSTEPS | | CCAGGTAGCCCTGCTGGCTCTCCGACTT | |
| | EGSAPGTSTEPSEGS | | CTACTGAGGAAGGTAGCCCGGCTGGTTC | |
| | APGTSTEPSEGSAPG | | TCCGACTTCTACTGAGGAAGGTACTTCT | |
| | SSTPSGATGSPGSSPS | | ACCGAACCTTCCGAAGGTAGCGCTCCA | |
| | ASTGTGPGASPGTSS | | GGTGCAAGCGCAAGCGGCGCGCCAAGC | |
| | TGSPGSEPATSGSET | | ACGGGAGGTACTTCTGAAAGCGCTACTC | |
| | PGTSESATPESGPGSP | | CTGAGTCCGGCCCAGGTAGCCCGGCTG | |
| | AGSPTSTEEGSSTPS | | GCTCTCCGACTTCCACCGAGGAAGGTAG | |
| | GATGSPGSSPSASTG | | CCCGGCTGGCTCTCCAACTTCTACTGAA | |
| | TGPGASPGTSSTGSP | | GAAGGTTCTACCAGCTCTACCGCTGAAT | |
| | GTSESATPESGPGTS | | CTCCTGGCCCAGGTTCTACTAGCGAATC | |
| | TEPSEGSAPGTSTEPS | | TCCGTCTGGCACCGCACCAGGTACTTCC | |
| | EGSAPGFPTIPL SRLF | | CCTAGCGGTGAATCTTCTACTGCACCAG | |
| | DNAMLRAHRLHQL | | GTACCCCTGGCAGCGGTACCGCTTCTTC | |
| | AFDTYQEFEEAYIPK | | CTCTCCAGGTAGCTCTACCCCGTCTGGT | |
| | EQKYSFLQNPQTSLC | | GCTACTGGCTCTCCAGGTTCTAGCCCGT | |
| | FSESIPTPSNREETQQ | | CTGCATCTACCGGTACCGGCCCAGGTAG | |
| | KSNLELLRISLLLIQS | | CGAACCGGCAACCTCCGGCTCTGAAACT | |
| | WLEPVQFLRSVFAN | | CCAGGTACTTCTGAAAGCGCTACTCCGG | |
| | SLVYGASDSNVYDL | | AATCCGGCCCAGGTAGCGAACCGGCTA | |
| | LKDLEEGIQTLMGRL | | CTTCCGGCTCTGAAACCCCAGGTTCCAC | |
| | EDGSPRTGQIFKQTY | | CAGCTCTACTGCAGAATCTCCGGGCCCA | |
| | SKFDTNSHNDDALL | | GGTTCTACTAGCTCTACTGCAGAATCTC | |
| | KNYGLLYCFRKDMD | | CGGGTCCAGGTACTTCTCCTAGCGGCGA | |
| | KVETFLRIVQCRSVE | | ATCTTCTACCGCTCCAGGTAGCGAACCG | |
| | GSCGFGLTPRSLLVG | | GCAACCTCTGGCTCTGAAACTCCAGGTA | |
| | GGGTSESATPESGPG | | GCGAACCTGCAACCTCCGGCTCTGAAAC | |
| | SEPATSGSETPGTSES | | CCCAGGTACTTCTACTGAACCTTCTGAG | |
| | ATPESGPGSEPATSG | | GGCAGCGCACCAGGTTCTACCAGCTCTA | |
| | SETPGTSESATPESGP | | CCGCAGAATCTCCTGGTCCAGGTACCTC | |
| | GTSTEPSEGSAPGSP | | TACTCCGGAAAGCGGCTCTGCATCTCCA | |
| | AGSPTSTEEGTSESA | | GGTTCTACTAGCGAATCTCCTTCTGGCA | |
| | TPESGPGSEPATSGS | | CTGCACCAGGTACTTCTACCGAACCGTC | |
| | ETPGTSESATPESGP | | CGAAGGCAGCGCTCCAGGTACCTCTACT | |
| | GSPAGSPTSTEEGSP | | GAACCTTCCGAGGGCAGCGCTCCAGGT | |
| | AGSPTSTEEGTSTEPS | | ACCTCTACCGAACCTTCTGAAGGTAGCG | |
| | EGSAPGTSESATPES | | CACCAGGTAGCTCTACTCCGTCTGGTGC | |
| | GPGTSESATPESGPG | | AACCGGCTCCCCAGGTTCTAGCCCGTCT | |
| | TSESATPESGPGSEP | | GCTTCCACTGGTACTGGCCCAGGTGCTT | |
| | ATSGSETPGSEPATS | | CCCCGGGCACCAGCTCTACTGGTTCTCC | |
| | GSETPGSPAGSPTST | | AGGTAGCGAACCTGCTACCTCCGGTTCT | |
| | EEGTSTEPSEGSAPG | | GAAACCCCAGGTACCTCTGAAAGCGCA | |
| | TSTEPSEGSAPGSEP | | ACTCCGGAGTCTGGTCCAGGTAGCCCTG | |
| | ATSGSETPGTSESAT | | CAGGTTCTCCTACCTCCACTGAGGAAGG | |
| | PESGPGTSTEPSEGS | | TAGCTCTACTCCGTCTGGTGCAACCGGC | |
| | AP | | TCCCCAGGTTCTAGCCCGTCTGCTTCCA | |
| | | | CTGGTACTGGCCCAGGTGCTTCCCCGGG | |
| | | | CACCAGCTCTACTGGTTCTCCAGGTACC | |
| | | | TCTGAAAGCGCTACTCCGGAGTCTGGCC | |
| | | | CAGGTACCTCTACTGAACCGTCTGAGGG | |
| | | | TAGCGCTCCAGGTACTTCTACTGAACCG | |
| | | | TCCGAAGGTAGCGCACCAGGTTTTCCGA | |
| | | | CTATTCCGCTGTCTCGTCTGTTTGATAAT | |
| | | | GCTATGCTGCGTGCGCACCGTCTGCACC | |
| | | | AGCTGGCCTTTGATACTTACCAGGAATT | |
| | | | TGAAGAAGCcTACATTCCTAAAGAGCAG | |
| | | | AAGTACTCTTTCCTGCAAAACCCACAGA | |
| | | | CTTCTCTCTGCTTCAGCGAATCTATTCCG | |
| | | | ACGCCTTCCAATCGCGAGGAAACTCAG | |
| | | | CAAAAGTCCAATCTGGAACTACTCCGCA | |
| | | | TTTCTCTGCTTCTGATTCAGAGCTGGCT | |
| | | | AGAACCAGTGCAATTTCTGCGTTCCGTC | |
| | | | TTCGCCAATAGCCTAGTTTATGGCGCAT | |
| | | | CCGACAGCAACGTATACGATCTCCTGAA | |
| | | | AGATCTCGAGGAAGGCATTCAGACCCT | |
| | | | GATGGGTCGTCTCGAGGATGGCTCTCCG | |
| | | | CGTACTGGTCAGATCTTCAAGCAGACTT | |
| | | | ACTCTAAATTTGATACTAACAGCCACAA | |
| | | | TGACGATGCGCTTCTAAAAAACTATGGT | |
| | | | CTGCTGTATTGTTTTCGTAAAGATATGG | |
| | | | ACAAAGTTGAAACCTTCCTGCGTATTGT | |
| | | | TCAGTGTCGTTCCGTTGAGGGCAGCTGT | |
| | | | GGTTTCTAAGGTctgaccccgcgcagcctgctggtgg | |
| | | | gcggcGGTGGTACCTCTGAAAGCGCAACT | |
| | | | CCTGAGTCTGGCCCAGGTAGCGAACCTG | |
| | | | CTACCTCCGGCTCTGAGACTCCAGGTAC | |
| | | | CTCTGAAAGCGCAACCCCGGAATCTGGT | |
| | | | CCAGGTAGCGAACCTGCAACCTCTGGCT | |
| | | | CTGAAACCCCAGGTACCTCTGAAAGCG | |
| | | | CTACTCCTGAATCTGGCCCAGGTACTTC | |
| | | | TACTGAACCGTCCGAGGGCAGCGCACC | |
| | | | AGGTAGCCCTGCTGGCTCTCCAACCTCC | |
| | | | ACCGAAGAAGGTACCTCTGAAAGCGCA | |
| | | | ACCCCTGAATCCGGCCCAGGTAGCGAA | |
| | | | CCGGCAACCTCCGGTTCTGAAACCCCAG | |
| | | | GTACTTCTGAAAGCGCTACTCCTGAGTC | |
| | | | CGGCCCAGGTAGCCCGGCTGGCTCTCCG | |
| | | | ACTTCCACCGAGGAAGGTAGCCCGGCT | |
| | | | GGCTCTCCAACTTCTACTGAAGAAGGTA | |
| | | | CTTCTACCGAACCTTCCGAGGGCAGCGC | |
| | | | ACCAGGTACTTCTGAAAGCGCTACCCCT | |
| | | | GAGTCCGGCCCAGGTACTTCTGAAAGC | |
| | | | GCTACTCCTGAATCCGGTCCAGGTACTT | |
| | | | CTGAAAGCGCTACCCCGGAATCTGGCCC | |
| | | | AGGTAGCGAACCGGCTACTTCTGGTTCT | |
| | | | GAAACCCCAGGTAGCGAACCGGCTACC | |
| | | | TCCGGTTCTGAAACTCCAGGTAGCCCAG | |
| | | | CAGGCTCTCCGACTTCCACTGAGGAAGG | |
| | | | TACTTCTACTGAACCTTCCGAAGGCAGC | |
| | | | GCACCAGGTACCTCTACTGAACCTTCTG | |
| | | | AGGGCAGCGCTCCAGGTAGCGAACCTG | |
| | | | CAACCTCTGGCTCTGAAACCCCAGGTAC | |
| | | | CTCTGAAAGCGCTACTCCTGAATCTGGC | |
| | | | CCAGGTACTTCTACTGAACCGTCCGAGG | |
| | | | GCAGCGCACCA | |
| AM923- | MAEPAGSPTSTEEGA | 823 | ATGGCTGAACCTGCTGGCTCTCCAACCT | 824 |
| hGH- | SPGTSSTGSPGSSTPS | | CCACTGAGGAAGGTGCATCCCCGGGCA | |
| FXIa- | GATGSPGSSTPSGAT | | CCAGCTCTACCGGTTCTCCAGGTAGCTC | |
| AE288 | GSPGTSTEPSEGSAP | | TACCCCGTCTGGTGCTACCGGCTCTCCA | |
| | GSEPATSGSETPGSP | | GGTAGCTCTACCCCGTCTGGTGCTACTG | |
| | AGSPTSTEEGSTSST | | GCTCTCCAGGTACTTCTACTGAACCGTC | |
| | AESPGPGTSTPESGS | | TGAAGGCAGCGCACCAGGTAGCGAACC | |
| | ASPGSTSESPSGTAP | | GGCTACTTCCGGTTCTGAAACCCCAGGT | |
| | GSTSESPSGTAPGTS | | AGCCCAGCAGGTTCTCCAACTTCTACTG | |
| | TPESGSASPGTSTPES | | AAGAAGGTTCTACCAGCTCTACCGCAG | |
| | GSASPGSEPATSGSE | | AATCTCCTGGTCCAGGTACCTCTACTCC | |
| | TPGTSESATPESGPG | | GGAAAGCGGCTCTGCATCTCCAGGTTCT | |
| | SPAGSPTSTEEGTSTE | | ACTAGCGAATCTCCTTCTGGCACTGCAC | |
| | PSEGSAPGTSESATP | | CAGGTTCTACTAGCGAATCCCCGTCTGG | |
| | ESGPGTSTEPSEGSA | | TACTGCTCCAGGTACTTCTACTCCTGAA | |
| | PGTSTEPSEGSAPGSP | | AGCGGTTCCGCTTCTCCAGGTACCTCTA | |
| | AGSPTSTEEGTSTEPS | | CTCCGGAAAGCGGTTCTGCATCTCCAGG | |
| | EGSAPGTSTEPSEGS | | TAGCGAACCGGCAACCTCCGGCTCTGA | |
| | APGTSESATPESGPG | | AACCCCAGGTACCTCTGAAAGCGCTACT | |
| | TSESATPESGPGTSTE | | CCTGAATCCGGCCCAGGTAGCCCGGCA | |
| | PSEGSAPGTSTEPSE | | GGTTCTCCGACTTCCACTGAGGAAGGTA | |
| | GSAPGTSESATPESG | | CCTCTACTGAACCTTCTGAGGGCAGCGC | |
| | PGTSTEPSEGSAPGS | | TCCAGGTACTTCTGAAAGCGCTACCCCG | |
| | EPATSGSETPGSPAG | | GAGTCCGGTCCAGGTACTTCTACTGAAC | |
| | SPTSTEEGSSTPSGAT | | CGTCCGAAGGTAGCGCACCAGGTACTTC | |
| | GSPGTPGSGTASSSP | | TACCGAACCGTCCGAGGGTAGCGCACC | |
| | GSSTPSGATGSPGTS | | AGGTAGCCCAGCAGGTTCTCCTACCTCC | |
| | TEPSEGSAPGTSTEPS | | ACCGAGGAAGGTACTTCTACCGAACCG | |
| | EGSAPGSEPATSGSE | | TCCGAGGGTAGCGCACCAGGTACTTCTA | |
| | TPGSPAGSPTSTEEG | | CCGAACCTTCCGAGGGCAGCGCACCAG | |
| | SPAGSPTSTEEGTSTE | | GTACTTCTGAAAGCGCTACCCCTGAGTC | |
| | PSEGSAPGASASGAP | | CGGCCCAGGTACTTCTGAAAGCGCTACT | |
| | STGGTSESATPESGP | | CCTGAATCCGGTCCAGGTACCTCTACTG | |
| | GSPAGSPTSTEEGSP | | AACCTTCCGAAGGCAGCGCTCCAGGTA | |
| | AGSPTSTEEGSTSST | | CCTCTACCGAACCGTCCGAGGGCAGCG | |
| | AESPGPGSTSESPSGT | | CACCAGGTACTTCTGAAAGCGCAACCCC | |
| | APGTSPSGESSTAPG | | TGAATCCGGTCCAGGTACTTCTACTGAA | |
| | TPGSGTASSSPGSSTP | | CCTTCCGAAGGTAGCGCTCCAGGTAGCG | |
| | SGATGSPGSSPSAST | | AACCTGCTACTTCTGGTTCTGAAACCCC | |
| | GTGPGSEPATSGSET | | AGGTAGCCCGGCTGGCTCTCCGACCTCC | |
| | PGTSESATPESGPGS | | ACCGAGGAAGGTAGCTCTACCCCGTCTG | |
| | EPATSGSETPGSTSST | | GTGCTACTGGTTCTCCAGGTACTCCGGG | |
| | AESPGPGSTSSTAESP | | CAGCGGTACTGCTTCTTCCTCTCCAGGT | |
| | GPGTSPSGESSTAPG | | AGCTCTACCCCTTCTGGTGCTACTGGCT | |
| | SEPATSGSETPGSEP | | CTCCAGGTACCTCTACCGAACCGTCCGA | |
| | ATSGSETPGTSTEPSE | | GGGTAGCGCACCAGGTACCTCTACTGA | |
| | GSAPGSTSSTAESPG | | ACCGTCTGAGGGTAGCGCTCCAGGTAG | |
| | PGTSTPESGSASPGST | | CGAACCGGCAACCTCCGGTTCTGAAACT | |
| | SESPSGTAPGTSTEPS | | CCAGGTAGCCCTGCTGGCTCTCCGACTT | |
| | EGSAPGTSTEPSEGS | | CTACTGAGGAAGGTAGCCCGGCTGGTTC | |
| | APGTSTEPSEGSAPG | | TCCGACTTCTACTGAGGAAGGTACTTCT | |
| | SSTPSGATGSPGSSPS | | ACCGAACCTTCCGAAGGTAGCGCTCCA | |
| | ASTGTGPGASPGTSS | | GGTGCAAGCGCAAGCGGCGCGCCAAGC | |
| | TGSPGSEPATSGSET | | ACGGGAGGTACTTCTGAAAGCGCTACTC | |
| | PGTSESATPESGPGSP | | CTGAGTCCGGCCCAGGTAGCCCGGCTG | |
| | AGSPTSTEEGSSTPS | | GCTCTCCGACTTCCACCGAGGAAGGTAG | |
| | GATGSPGSSPSASTG | | CCCGGCTGGCTCTCCAACTTCTACTGAA | |
| | TGPGASPGTSSTGSP | | GAAGGTTCTACCAGCTCTACCGCTGAAT | |
| | GTSESATPESGPGTS | | CTCCTGGCCCAGGTTCTACTAGCGAATC | |
| | TEPSEGSAPGTSTEPS | | TCCGTCTGGCACCGCACCAGGTACTTCC | |
| | EGSAPGFPTIPLSRLF | | CCTAGCGGTGAATCTTCTACTGCACCAG | |
| | DNAMLRAHRLHQL | | GTACCCCTGGCAGCGGTACCGCTTCTTC | |
| | AFDTYQEFEEAYIPK | | CTCTCCAGGTAGCTCTACCCCGTCTGGT | |
| | EQKYSFLQNPQTSLC | | GCTACTGGCTCTCCAGGTTCTAGCCCGT | |
| | FSESIPTPSNREETQQ | | CTGCATCTACCGGTACCGGCCCAGGTAG | |
| | KSNLELLRISLLLIQS | | CGAACCGGCAACCTCCGGCTCTGAAACT | |
| | WLEPVQFLRSVFAN | | CCAGGTACTTCTGAAAGCGCTACTCCGG | |
| | SLVYGASDSNVYDL | | AATCCGGCCCAGGTAGCGAACCGGCTA | |
| | LKDLEEGIQTLMGRL | | CTTCCGGCTCTGAAACCCCAGGTTCCAC | |
| | EDGSPRTGQIFKQTY | | CAGCTCTACTGCAGAATCTCCGGGCCCA | |
| | SKFDTNSHNDDALL | | GGTTCTACTAGCTCTACTGCAGAATCTC | |
| | KNYGLLYCFRKDMD | | CGGGTCCAGGTACTTCTCCTAGCGGCGA | |
| | KVETFLRIVQCRSVE | | ATCTTCTACCGCTCCAGGTAGCGAACCG | |
| | GSCGFGGGKLTRVV | | GCAACCTCTGGCTCTGAAACTCCAGGTA | |
| | GGGGTSESATPESGP | | GCGAACCTGCAACCTCCGGCTCTGAAAC | |
| | GSEPATSGSETPGTS | | CCCAGGTACTTCTACTGAACCTTCTGAG | |
| | ESATPESGPGSEPAT | | GGCAGCGCACCAGGTTCTACCAGCTCTA | |
| | SGSETPGTSESATPES | | CCGCAGAATCTCCTGGTCCAGGTACCTC | |
| | GPGTSTEPSEGSAPG | | TACTCCGGAAAGCGGCTCTGCATCTCCA | |
| | SPAGSPTSTEEGTSES | | GGTTCTACTAGCGAATCTCCTTCTGGCA | |
| | ATPESGPGSEPATSG | | CTGCACCAGGTACTTCTACCGAACCGTC | |
| | SETPGTSESATPESGP | | CGAAGGCAGCGCTCCAGGTACCTCTACT | |
| | GSPAGSPTSTEEGSP | | GAACCTTCCGAGGGCAGCGCTCCAGGT | |
| | AGSPTSTEEGTSTEPS | | ACCTCTACCGAACCTTCTGAAGGTAGCG | |
| | EGSAPGTSESATPES | | CACCAGGTAGCTCTACTCCGTCTGGTGC | |
| | GPGTSESATPESGPG | | AACCGGCTCCCCAGGTTCTAGCCCGTCT | |
| | TSESATPESGPGSEP | | GCTTCCACTGGTACTGGCCCAGGTGCTT | |
| | ATSGSETPGSEPATS | | CCCCGGGCACCAGCTCTACTGGTTCTCC | |
| | GSETPGSPAGSPTST | | AGGTAGCGAACCTGCTACCTCCGGTTCT | |
| | EEGTSTEPSEGSAPG | | GAAACCCCAGGTACCTCTGAAAGCGCA | |
| | TSTEPSEGSAPGSEP | | ACTCCGGAGTCTGGTCCAGGTAGCCCTG | |
| | ATSGSETPGTSESAT | | CAGGTTCTCCTACCTCCACTGAGGAAGG | |
| | PESGPGTSTEPSEGS | | TAGCTCTACTCCGTCTGGTGCAACCGGC | |
| | AP | | TCCCCAGGTTCTAGCCCGTCTGCTTCCA | |
| | | | CTGGTACTGGCCCAGGTGCTTCCCCGGG | |
| | | | CACCAGCTCTACTGGTTCTCCAGGTACC | |
| | | | TCTGAAAGCGCTACTCCGGAGTCTGGCC | |
| | | | CAGGTACCTCTACTGAACCGTCTGAGGG | |
| | | | TAGCGCTCCAGGTACTTCTACTGAACCG | |
| | | | TCCGAAGGTAGCGCACCAGGTTTTCCGA | |
| | | | CTATTCCGCTGTCTCGTCTGTTTGATAAT | |
| | | | GCTATGCTGCGTGCGCACCGTCTGCACC | |
| | | | AGCTGGCCTTTGATACTTACCAGGAATT | |
| | | | TGAAGAAGCcTACATTCCTAAAGAGCAG | |
| | | | AAGTACTCTTTCCTGCAAAACCCACAGA | |
| | | | CTTCTCTCTGCTTCAGCGAATCTATTCCG | |
| | | | ACGCCTTCCAATCGCGAGGAAACTCAG | |
| | | | CAAAAGTCCAATCTGGAACTACTCCGCA | |
| | | | TTTCTCTGCTTCTGATTCAGAGCTGGCT | |
| | | | AGAACCAGTGCAATTTCTGCGTTCCGTC | |
| | | | TTCGCCAATAGCCTAGTTTATGGCGCAT | |
| | | | CCGACAGCAACGTATACGATCTCCTGAA | |
| | | | AGATCTCGAGGAAGGCATTCAGACCCT | |
| | | | GATGGGTCGTCTCGAGGATGGCTCTCCG | |
| | | | CGTACTGGTCAGATCTTCAAGCAGACTT | |
| | | | ACTCTAAATTTGATACTAACAGCCACAA | |
| | | | TGACGATGCGCTTCTAAAAAACTATGGT | |
| | | | CTGCTGTATTGTTTTCGTAAAGATATGG | |
| | | | ACAAAGTTGAAACCTTCCTGCGTATTGT | |
| | | | TCAGTGTCGTTCCGTTGAGGGCAGCTGT | |
| | | | GGTTTCTAAGGTggcggcaaactgacccgcgtggtg | |
| | | | ggcggcGGTGGTACCTCTGAAAGCGCAAC | |
| | | | TCCTGAGTCTGGCCCAGGTAGCGAACCT | |
| | | | GCTACCTCCGGCTCTGAGACTCCAGGTA | |
| | | | CCTCTGAAAGCGCAACCCCGGAATCTG | |
| | | | GTCCAGGTAGCGAACCTGCAACCTCTGG | |
| | | | CTCTGAAACCCCAGGTACCTCTGAAAGC | |
| | | | GCTACTCCTGAATCTGGCCCAGGTACTT | |
| | | | CTACTGAACCGTCCGAGGGCAGCGCAC | |
| | | | CAGGTAGCCCTGCTGGCTCTCCAACCTC | |
| | | | CACCGAAGAAGGTACCTCTGAAAGCGC | |
| | | | AACCCCTGAATCCGGCCCAGGTAGCGA | |
| | | | ACCGGCAACCTCCGGTTCTGAAACCCCA | |
| | | | GGTACTTCTGAAAGCGCTACTCCTGAGT | |
| | | | CCGGCCCAGGTAGCCCGGCTGGCTCTCC | |
| | | | GACTTCCACCGAGGAAGGTAGCCCGGC | |
| | | | TGGCTCTCCAACTTCTACTGAAGAAGGT | |
| | | | ACTTCTACCGAACCTTCCGAGGGCAGCG | |
| | | | CACCAGGTACTTCTGAAAGCGCTACCCC | |
| | | | TGAGTCCGGCCCAGGTACTTCTGAAAGC | |
| | | | GCTACTCCTGAATCCGGTCCAGGTACTT | |
| | | | CTGAAAGCGCTACCCCGGAATCTGGCCC | |
| | | | AGGTAGCGAACCGGCTACTTCTGGTTCT | |
| | | | GAAACCCCAGGTAGCGAACCGGCTACC | |
| | | | TCCGGTTCTGAAACTCCAGGTAGCCCAG | |
| | | | CAGGCTCTCCGACTTCCACTGAGGAAGG | |
| | | | TACTTCTACTGAACCTTCCGAAGGCAGC | |
| | | | GCACCAGGTACCTCTACTGAACCTTCTG | |
| | | | AGGGCAGCGCTCCAGGTAGCGAACCTG | |
| | | | CAACCTCTGGCTCTGAAACCCCAGGTAC | |
| | | | CTCTGAAAGCGCTACTCCTGAATCTGGC | |
| | | | CCAGGTACTTCTACTGAACCGTCCGAGG | |
| | | | GCAGCGCACCA | |
| AM923- | MAEPAGSPTSTEEGA | 825 | ATGGCTGAACCTGCTGGCTCTCCAACCT | 826 |
| hGH- | SPGTSSTGSPGSSTPS | | CCACTGAGGAAGGTGCATCCCCGGGCA | |
| Elastase- | GATGSPGSSTPSGAT | | CCAGCTCTACCGGTTCTCCAGGTAGCTC | |
| AE288 | GSPGTSTEPSEGSAP | | TACCCCGTCTGGTGCTACCGGCTCTCCA | |
| | GSEPATSGSETPGSP | | GGTAGCTCTACCCCGTCTGGTGCTACTG | |
| | AGSPTSTEEGSTSST | | GCTCTCCAGGTACTTCTACTGAACCGTC | |
| | AESPGPGTSTPESGS | | TGAAGGCAGCGCACCAGGTAGCGAACC | |
| | ASPGSTSESPSGTAP | | GGCTACTTCCGGTTCTGAAACCCCAGGT | |
| | GSTSESPSGTAPGTS | | AGCCCAGCAGGTTCTCCAACTTCTACTG | |
| | TPESGSASPGTSTPES | | AAGAAGGTTCTACCAGCTCTACCGCAG | |
| | GSASPGSEPATSGSE | | AATCTCCTGGTCCAGGTACCTCTACTCC | |
| | TPGTSESATPESGPG | | GGAAAGCGGCTCTGCATCTCCAGGTTCT | |
| | SPAGSPTSTEEGTSTE | | ACTAGCGAATCTCCTTCTGGCACTGCAC | |
| | PSEGSAPGTSESATP | | CAGGTTCTACTAGCGAATCCCCGTCTGG | |
| | ESGPGTSTEPSEGSA | | TACTGCTCCAGGTACTTCTACTCCTGAA | |
| | PGTSTEPSEGSAPGSP | | AGCGGTTCCGCTTCTCCAGGTACCTCTA | |
| | AGSPTSTEEGTSTEPS | | CTCCGGAAAGCGGTTCTGCATCTCCAGG | |
| | EGSAPGTSTEPSEGS | | TAGCGAACCGGCAACCTCCGGCTCTGA | |
| | APGTSESATPESGPG | | AACCCCAGGTACCTCTGAAAGCGCTACT | |
| | TSESATPESGPGTSTE | | CCTGAATCCGGCCCAGGTAGCCCGGCA | |
| | PSEGSAPGTSTEPSE | | GGTTCTCCGACTTCCACTGAGGAAGGTA | |
| | GSAPGTSESATPESG | | CCTCTACTGAACCTTCTGAGGGCAGCGC | |
| | PGTSTEPSEGSAPGS | | TCCAGGTACTTCTGAAAGCGCTACCCCG | |
| | EPATSGSETPGSPAG | | GAGTCCGGTCCAGGTACTTCTACTGAAC | |
| | SPTSTEEGSSTPSGAT | | CGTCCGAAGGTAGCGCACCAGGTACTTC | |
| | GSPGTPGSGTASSSP | | TACCGAACCGTCCGAGGGTAGCGCACC | |
| | GSSTPSGATGSPGTS | | AGGTAGCCCAGCAGGTTCTCCTACCTCC | |
| | TEPSEGSAPGTSTEPS | | ACCGAGGAAGGTACTTCTACCGAACCG | |
| | EGSAPGSEPATSGSE | | TCCGAGGGTAGCGCACCAGGTACTTCTA | |
| | TPGSPAGSPTSTEEG | | CCGAACCTTCCGAGGGCAGCGCACCAG | |
| | SPAGSPTSTEEGTSTE | | GTACTTCTGAAAGCGCTACCCCTGAGTC | |
| | PSEGSAPGASASGAP | | CGGCCCAGGTACTTCTGAAAGCGCTACT | |
| | STGGTSESATPESGP | | CCTGAATCCGGTCCAGGTACCTCTACTG | |
| | GSPAGSPTSTEEGSP | | AACCTTCCGAAGGCAGCGCTCCAGGTA | |
| | AGSPTSTEEGSTSST | | CCTCTACCGAACCGTCCGAGGGCAGCG | |
| | AESPGPGSTSESPSGT | | CACCAGGTACTTCTGAAAGCGCAACCCC | |
| | APGTSPSGESSTAPG | | TGAATCCGGTCCAGGTACTTCTACTGAA | |
| | TPGSGTASSSPGSSTP | | CCTTCCGAAGGTAGCGCTCCAGGTAGCG | |
| | SGATGSPGSSPSAST | | AACCTGCTACTTCTGGTTCTGAAACCCC | |
| | GTGPGSEPATSGSET | | AGGTAGCCCGGCTGGCTCTCCGACCTCC | |
| | PGTSESATPESGPGS | | ACCGAGGAAGGTAGCTCTACCCCGTCTG | |
| | EPATSGSETPGSTSST | | GTGCTACTGGTTCTCCAGGTACTCCGGG | |
| | AESPGPGSTSSTAESP | | CAGCGGTACTGCTTCTTCCTCTCCAGGT | |
| | GPGTSPSGESSTAPG | | AGCTCTACCCCTTCTGGTGCTACTGGCT | |
| | SEPATSGSETPGSEP | | CTCCAGGTACCTCTACCGAACCGTCCGA | |
| | ATSGSETPGTSTEPSE | | GGGTAGCGCACCAGGTACCTCTACTGA | |
| | GSAPGSTSSTAESPG | | ACCGTCTGAGGGTAGCGCTCCAGGTAG | |
| | PGTSTPESGSASPGST | | CGAACCGGCAACCTCCGGTTCTGAAACT | |
| | SESPSGTAPGTSTEPS | | CCAGGTAGCCCTGCTGGCTCTCCGACTT | |
| | EGSAPGTSTEPSEGS | | CTACTGAGGAAGGTAGCCCGGCTGGTTC | |
| | APGTSTEPSEGSAPG | | TCCGACTTCTACTGAGGAAGGTACTTCT | |
| | SSTPSGATGSPGSSPS | | ACCGAACCTTCCGAAGGTAGCGCTCCA | |
| | ASTGTGPGASPGTSS | | GGTGCAAGCGCAAGCGGCGCGCCAAGC | |
| | TGSPGSEPATSGSET | | ACGGGAGGTACTTCTGAAAGCGCTACTC | |
| | PGTSESATPESGPGSP | | CTGAGTCCGGCCCAGGTAGCCCGGCTG | |
| | AGSPTSTEEGSSTPS | | GCTCTCCGACTTCCACCGAGGAAGGTAG | |
| | GATGSPGSSPSASTG | | CCCGGCTGGCTCTCCAACTTCTACTGAA | |
| | TGPGASPGTSSTGSP | | GAAGGTTCTACCAGCTCTACCGCTGAAT | |
| | GTSESATPESGPGTS | | CTCCTGGCCCAGGTTCTACTAGCGAATC | |
| | TEPSEGSAPGTSTEPS | | TCCGTCTGGCACCGCACCAGGTACTTCC | |
| | EGSAPGFPTIPLSRLF | | CCTAGCGGTGAATCTTCTACTGCACCAG | |
| | DNAMLRAHRLHQL | | GTACCCCTGGCAGCGGTACCGCTTCTTC | |
| | AFDTYQEFEEAYIPK | | CTCTCCAGGTAGCTCTACCCCGTCTGGT | |
| | EQKYSFLQNPQTSLC | | GCTACTGGCTCTCCAGGTTCTAGCCCGT | |
| | FSESIPTPSNREETQQ | | CTGCATCTACCGGTACCGGCCCAGGTAG | |
| | KSNLELLRISLLLIQS | | CGAACCGGCAACCTCCGGCTCTGAAACT | |
| | WLEPVQFLRSVFAN | | CCAGGTACTTCTGAAAGCGCTACTCCGG | |
| | SLVYGASDSNVYDL | | AATCCGGCCCAGGTAGCGAACCGGCTA | |
| | LKDLEEGIQTLMGRL | | CTTCCGGCTCTGAAACCCCAGGTTCCAC | |
| | EDGSPRTGQIFKQTY | | CAGCTCTACTGCAGAATCTCCGGGCCCA | |
| | SKFDTNSHNDDALL | | GGTTCTACTAGCTCTACTGCAGAATCTC | |
| | KNYGLLYCFRKDMD | | CGGGTCCAGGTACTTCTCCTAGCGGCGA | |
| | KVETFLRIVQCRSVE | | ATCTTCTACCGCTCCAGGTAGCGAACCG | |
| | GSCGFGGGLGPVSG | | GCAACCTCTGGCTCTGAAACTCCAGGTA | |
| | VPGGTSESATPESGP | | GCGAACCTGCAACCTCCGGCTCTGAAAC | |
| | GSEPATSGSETPGTS | | CCCAGGTACTTCTACTGAACCTTCTGAG | |
| | ESATPESGPGSEPAT | | GGCAGCGCACCAGGTTCTACCAGCTCTA | |
| | SGSETPGTSESATPES | | CCGCAGAATCTCCTGGTCCAGGTACCTC | |
| | GPGTSTEPSEGSAPG | | TACTCCGGAAAGCGGCTCTGCATCTCCA | |
| | SPAGSPTSTEEGTSES | | GGTTCTACTAGCGAATCTCCTTCTGGCA | |
| | ATPESGPGSEPATSG | | CTGCACCAGGTACTTCTACCGAACCGTC | |
| | SETPGTSESATPESGP | | CGAAGGCAGCGCTCCAGGTACCTCTACT | |
| | GSPAGSPTSTEEGSP | | GAACCTTCCGAGGGCAGCGCTCCAGGT | |
| | AGSPTSTEEGTSTEPS | | ACCTCTACCGAACCTTCTGAAGGTAGCG | |
| | EGSAPGTSESATPES | | CACCAGGTAGCTCTACTCCGTCTGGTGC | |
| | GPGTSESATPESGPG | | AACCGGCTCCCCAGGTTCTAGCCCGTCT | |
| | TSESATPESGPGSEP | | GCTTCCACTGGTACTGGCCCAGGTGCTT | |
| | ATSGSETPGSEPATS | | CCCCGGGCACCAGCTCTACTGGTTCTCC | |
| | GSETPGSPAGSPTST | | AGGTAGCGAACCTGCTACCTCCGGTTCT | |
| | EEGTSTEPSEGSAPG | | GAAACCCCAGGTACCTCTGAAAGCGCA | |
| | TSTEPSEGSAPGSEP | | ACTCCGGAGTCTGGTCCAGGTAGCCCTG | |
| | ATSGSETPGTSESAT | | CAGGTTCTCCTACCTCCACTGAGGAAGG | |
| | PESGPGTSTEPSEGS | | TAGCTCTACTCCGTCTGGTGCAACCGGC | |
| | AP | | TCCCCAGGTTCTAGCCCGTCTGCTTCCA | |
| | | | CTGGTACTGGCCCAGGTGCTTCCCCGGG | |
| | | | CACCAGCTCTACTGGTTCTCCAGGTACC | |
| | | | TCTGAAAGCGCTACTCCGGAGTCTGGCC | |
| | | | CAGGTACCTCTACTGAACCGTCTGAGGG | |
| | | | TAGCGCTCCAGGTACTTCTACTGAACCG | |
| | | | TCCGAAGGTAGCGCACCAGGTTTTCCGA | |
| | | | CTATTCCGCTGTCTCGTCTGTTTGATAAT | |
| | | | GCTATGCTGCGTGCGCACCGTCTGCACC | |
| | | | AGCTGGCCTTTGATACTTACCAGGAATT | |
| | | | TGAAGAAGCcTACATTCCTAAAGAGCAG | |
| | | | AAGTACTCTTTCCTGCAAAACCCACAGA | |
| | | | CTTCTCTCTGCTTCAGCGAATCTATTCCG | |
| | | | ACGCCTTCCAATCGCGAGGAAACTCAG | |
| | | | CAAAAGTCCAATCTGGAACTACTCCGCA | |
| | | | TTTCTCTGCTTCTGATTCAGAGCTGGCT | |
| | | | AGAACCAGTGCAATTTCTGCGTTCCGTC | |
| | | | TTCGCCAATAGCCTAGTTTATGGCGCAT | |
| | | | CCGACAGCAACGTATACGATCTCCTGAA | |
| | | | AGATCTCGAGGAAGGCATTCAGACCCT | |
| | | | GATGGGTCGTCTCGAGGATGGCTCTCCG | |
| | | | CGTACTGGTCAGATCTTCAAGCAGACTT | |
| | | | ACTCTAAATTTGATACTAACAGCCACAA | |
| | | | TGACGATGCGCTTCTAAAAAACTATGGT | |
| | | | CTGCTGTATTGTTTTCGTAAAGATATGG | |
| | | | ACAAAGTTGAAACCTTCCTGCGTATTGT | |
| | | | TCAGTGTCGTTCCGTTGAGGGCAGCTGT | |
| | | | GGTTTCTAAGGTggcggcctgggcccggtgagcggc | |
| | | | gtgccgGGTGGTACCTCTGAAAGCGCAACT | |
| | | | CCTGAGTCTGGCCCAGGTAGCGAACCTG | |
| | | | CTACCTCCGGCTCTGAGACTCCAGGTAC | |
| | | | CTCTGAAAGCGCAACCCCGGAATCTGGT | |
| | | | CCAGGTAGCGAACCTGCAACCTCTGGCT | |
| | | | CTGAAACCCCAGGTACCTCTGAAAGCG | |
| | | | CTACTCCTGAATCTGGCCCAGGTACTTC | |
| | | | TACTGAACCGTCCGAGGGCAGCGCACC | |
| | | | AGGTAGCCCTGCTGGCTCTCCAACCTCC | |
| | | | ACCGAAGAAGGTACCTCTGAAAGCGCA | |
| | | | ACCCCTGAATCCGGCCCAGGTAGCGAA | |
| | | | CCGGCAACCTCCGGTTCTGAAACCCCAG | |
| | | | GTACTTCTGAAAGCGCTACTCCTGAGTC | |
| | | | CGGCCCAGGTAGCCCGGCTGGCTCTCCG | |
| | | | ACTTCCACCGAGGAAGGTAGCCCGGCT | |
| | | | GGCTCTCCAACTTCTACTGAAGAAGGTA | |
| | | | CTTCTACCGAACCTTCCGAGGGCAGCGC | |
| | | | ACCAGGTACTTCTGAAAGCGCTACCCCT | |
| | | | GAGTCCGGCCCAGGTACTTCTGAAAGC | |
| | | | GCTACTCCTGAATCCGGTCCAGGTACTT | |
| | | | CTGAAAGCGCTACCCCGGAATCTGGCCC | |
| | | | AGGTAGCGAACCGGCTACTTCTGGTTCT | |
| | | | GAAACCCCAGGTAGCGAACCGGCTACC | |
| | | | TCCGGTTCTGAAACTCCAGGTAGCCCAG | |
| | | | CAGGCTCTCCGACTTCCACTGAGGAAGG | |
| | | | TACTTCTACTGAACCTTCCGAAGGCAGC | |
| | | | GCACCAGGTACCTCTACTGAACCTTCTG | |
| | | | AGGGCAGCGCTCCAGGTAGCGAACCTG | |
| | | | CAACCTCTGGCTCTGAAACCCCAGGTAC | |
| | | | CTCTGAAAGCGCTACTCCTGAATCTGGC | |
| | | | CCAGGTACTTCTACTGAACCGTCCGAGG | |
| | | | GCAGCGCACCA | |
| AM923- | MAEPAGSPTSTEEGA | 827 | ATGGCTGAACCTGCTGGCTCTCCAACCT | 828 |
| hGH- | SPGTSSTGSPGSSTPS | | CCACTGAGGAAGGTGCATCCCCGGGCA | |
| MMP-17- | GATGSPGSSTPSGAT | | CCAGCTCTACCGGTTCTCCAGGTAGCTC | |
| AE288 | GSPGTSTEPSEGSAP | | TACCCCGTCTGGTGCTACCGGCTCTCCA | |
| | GSEPATSGSETPGSP | | GGTAGCTCTACCCCGTCTGGTGCTACTG | |
| | AGSPTSTEEGSTSST | | GCTCTCCAGGTACTTCTACTGAACCGTC | |
| | AESPGPGTSTPESGS | | TGAAGGCAGCGCACCAGGTAGCGAACC | |
| | ASPGSTSESPSGTAP | | GGCTACTTCCGGTTCTGAAACCCCAGGT | |
| | GSTSESPSGTAPGTS | | AGCCCAGCAGGTTCTCCAACTTCTACTG | |
| | TPESGSASPGTSTPES | | AAGAAGGTTCTACCAGCTCTACCGCAG | |
| | GSASPGSEPATSGSE | | AATCTCCTGGTCCAGGTACCTCTACTCC | |
| | TPGTSESATPESGPG | | GGAAAGCGGCTCTGCATCTCCAGGTTCT | |
| | SPAGSPTSTEEGTSTE | | ACTAGCGAATCTCCTTCTGGCACTGCAC | |
| | PSEGSAPGTSESATP | | CAGGTTCTACTAGCGAATCCCCGTCTGG | |
| | ESGPGTSTEPSEGSA | | TACTGCTCCAGGTACTTCTACTCCTGAA | |
| | PGTSTEPSEGSAPGSP | | AGCGGTTCCGCTTCTCCAGGTACCTCTA | |
| | AGSPTSTEEGTSTEPS | | CTCCGGAAAGCGGTTCTGCATCTCCAGG | |
| | EGSAPGTSTEPSEGS | | TAGCGAACCGGCAACCTCCGGCTCTGA | |
| | APGTSESATPESGPG | | AACCCCAGGTACCTCTGAAAGCGCTACT | |
| | TSESATPESGPGTSTE | | CCTGAATCCGGCCCAGGTAGCCCGGCA | |
| | PSEGSAPGTSTEPSE | | GGTTCTCCGACTTCCACTGAGGAAGGTA | |
| | GSAPGTSESATPESG | | CCTCTACTGAACCTTCTGAGGGCAGCGC | |
| | PGTSTEPSEGSAPGS | | TCCAGGTACTTCTGAAAGCGCTACCCCG | |
| | EPATSGSETPGSPAG | | GAGTCCGGTCCAGGTACTTCTACTGAAC | |
| | SPTSTEEGSSTPSGAT | | CGTCCGAAGGTAGCGCACCAGGTACTTC | |
| | GSPGTPGSGTASSSP | | TACCGAACCGTCCGAGGGTAGCGCACC | |
| | GSSTPSGATGSPGTS | | AGGTAGCCCAGCAGGTTCTCCTACCTCC | |
| | TEPSEGSAPGTSTEPS | | ACCGAGGAAGGTACTTCTACCGAACCG | |
| | EGSAPGSEPATSGSE | | TCCGAGGGTAGCGCACCAGGTACTTCTA | |
| | TPGSPAGSPTSTEEG | | CCGAACCTTCCGAGGGCAGCGCACCAG | |
| | SPAGSPTSTEEGTSTE | | GTACTTCTGAAAGCGCTACCCCTGAGTC | |
| | PSEGSAPGASASGAP | | CGGCCCAGGTACTTCTGAAAGCGCTACT | |
| | STGGTSESATPESGP | | CCTGAATCCGGTCCAGGTACCTCTACTG | |
| | GSPAGSPTSTEEGSP | | AACCTTCCGAAGGCAGCGCTCCAGGTA | |
| | AGSPTSTEEGSTSST | | CCTCTACCGAACCGTCCGAGGGCAGCG | |
| | AESPGPGSTSESPSGT | | CACCAGGTACTTCTGAAAGCGCAACCCC | |
| | APGTSPSGESSTAPG | | TGAATCCGGTCCAGGTACTTCTACTGAA | |
| | TPGSGTASSSPGSSTP | | CCTTCCGAAGGTAGCGCTCCAGGTAGCG | |
| | SGATGSPGSSPSAST | | AACCTGCTACTTCTGGTTCTGAAACCCC | |
| | GTGPGSEPATSGSET | | AGGTAGCCCGGCTGGCTCTCCGACCTCC | |
| | PGTSESATPESGPGS | | ACCGAGGAAGGTAGCTCTACCCCGTCTG | |
| | EPATSGSETPGSTSST | | GTGCTACTGGTTCTCCAGGTACTCCGGG | |
| | AESPGPGSTSSTAESP | | CAGCGGTACTGCTTCTTCCTCTCCAGGT | |
| | GPGTSPSGESSTAPG | | AGCTCTACCCCTTCTGGTGCTACTGGCT | |
| | SEPATSGSETPGSEP | | CTCCAGGTACCTCTACCGAACCGTCCGA | |
| | ATSGSETPGTSTEPSE | | GGGTAGCGCACCAGGTACCTCTACTGA | |
| | GSAPGSTSSTAESPG | | ACCGTCTGAGGGTAGCGCTCCAGGTAG | |
| | PGTSTPESGSASPGST | | CGAACCGGCAACCTCCGGTTCTGAAACT | |
| | SESPSGTAPGTSTEPS | | CCAGGTAGCCCTGCTGGCTCTCCGACTT | |
| | EGSAPGTSTEPSEGS | | CTACTGAGGAAGGTAGCCCGGCTGGTTC | |
| | APGTSTEPSEGSAPG | | TCCGACTTCTACTGAGGAAGGTACTTCT | |
| | SSTPSGATGSPGSSPS | | ACCGAACCTTCCGAAGGTAGCGCTCCA | |
| | ASTGTGPGASPGTSS | | GGTGCAAGCGCAAGCGGCGCGCCAAGC | |
| | TGSPGSEPATSGSET | | ACGGGAGGTACTTCTGAAAGCGCTACTC | |
| | PGTSESATPESGPGSP | | CTGAGTCCGGCCCAGGTAGCCCGGCTG | |
| | AGSPTSTEEGSSTPS | | GCTCTCCGACTTCCACCGAGGAAGGTAG | |
| | GATGSPGSSPSASTG | | CCCGGCTGGCTCTCCAACTTCTACTGAA | |
| | TGPGASPGTSSTGSP | | GAAGGTTCTACCAGCTCTACCGCTGAAT | |
| | GTSESATPESGPGTS | | CTCCTGGCCCAGGTTCTACTAGCGAATC | |
| | TEPSEGSAPGTSTEPS | | TCCGTCTGGCACCGCACCAGGTACTTCC | |
| | EGSAPGFPTIPLSRLF | | CCTAGCGGTGAATCTTCTACTGCACCAG | |
| | DNAMLRAHRLHQL | | GTACCCCTGGCAGCGGTACCGCTTCTTC | |
| | AFDTYQEFEEAYIPK | | CTCTCCAGGTAGCTCTACCCCGTCTGGT | |
| | EQKYSFLQNPQTSLC | | GCTACTGGCTCTCCAGGTTCTAGCCCGT | |
| | FSESIPTPSNREETQQ | | CTGCATCTACCGGTACCGGCCCAGGTAG | |
| | KSNLELLRISLLLIQS | | CGAACCGGCAACCTCCGGCTCTGAAACT | |
| | WLEPVQFLRSVFAN | | CCAGGTACTTCTGAAAGCGCTACTCCGG | |
| | SLVYGASDSNVYDL | | AATCCGGCCCAGGTAGCGAACCGGCTA | |
| | LKDLEEGIQTLMGRL | | CTTCCGGCTCTGAAACCCCAGGTTCCAC | |
| | EDGSPRTGQIFKQTY | | CAGCTCTACTGCAGAATCTCCGGGCCCA | |
| | SKFDTNSHNDDALL | | GGTTCTACTAGCTCTACTGCAGAATCTC | |
| | KNYGLLYCFRKDMD | | CGGGTCCAGGTACTTCTCCTAGCGGCGA | |
| | KVETFLRIVQCRSVE | | ATCTTCTACCGCTCCAGGTAGCGAACCG | |
| | GSCGFGAPLGLRLR | | GCAACCTCTGGCTCTGAAACTCCAGGTA | |
| | GGGGTSESATPESGP | | GCGAACCTGCAACCTCCGGCTCTGAAAC | |
| | GSEPATSGSETPGTS | | CCCAGGTACTTCTACTGAACCTTCTGAG | |
| | ESATPESGPGSEPAT | | GGCAGCGCACCAGGTTCTACCAGCTCTA | |
| | SGSETPGTSESATPES | | CCGCAGAATCTCCTGGTCCAGGTACCTC | |
| | GPGTSTEPSEGSAPG | | TACTCCGGAAAGCGGCTCTGCATCTCCA | |
| | SPAGSPTSTEEGTSES | | GGTTCTACTAGCGAATCTCCTTCTGGCA | |
| | ATPESGPGSEPATSG | | CTGCACCAGGTACTTCTACCGAACCGTC | |
| | SETPGTSESATPESGP | | CGAAGGCAGCGCTCCAGGTACCTCTACT | |
| | GSPAGSPTSTEEGSP | | GAACCTTCCGAGGGCAGCGCTCCAGGT | |
| | AGSPTSTEEGTSTEPS | | ACCTCTACCGAACCTTCTGAAGGTAGCG | |
| | EGSAPGTSESATPES | | CACCAGGTAGCTCTACTCCGTCTGGTGC | |
| | GPGTSESATPESGPG | | AACCGGCTCCCCAGGTTCTAGCCCGTCT | |
| | TSESATPESGPGSEP | | GCTTCCACTGGTACTGGCCCAGGTGCTT | |
| | ATSGSETPGSEPATS | | CCCCGGGCACCAGCTCTACTGGTTCTCC | |
| | GSETPGSPAGSPTST | | AGGTAGCGAACCTGCTACCTCCGGTTCT | |
| | EEGTSTEPSEGSAPG | | GAAACCCCAGGTACCTCTGAAAGCGCA | |
| | TSTEPSEGSAPGSEP | | ACTCCGGAGTCTGGTCCAGGTAGCCCTG | |
| | ATSGSETPGTSESAT | | CAGGTTCTCCTACCTCCACTGAGGAAGG | |
| | PESGPGTSTEPSEGS | | TAGCTCTACTCCGTCTGGTGCAACCGGC | |
| | AP | | TCCCCAGGTTCTAGCCCGTCTGCTTCCA | |
| | | | CTGGTACTGGCCCAGGTGCTTCCCCGGG | |
| | | | CACCAGCTCTACTGGTTCTCCAGGTACC | |
| | | | TCTGAAAGCGCTACTCCGGAGTCTGGCC | |
| | | | CAGGTACCTCTACTGAACCGTCTGAGGG | |
| | | | TAGCGCTCCAGGTACTTCTACTGAACCG | |
| | | | TCCGAAGGTAGCGCACCAGGTTTTCCGA | |
| | | | CTATTCCGCTGTCTCGTCTGTTTGATAAT | |
| | | | GCTATGCTGCGTGCGCACCGTCTGCACC | |
| | | | AGCTGGCCTTTGATACTTACCAGGAATT | |
| | | | TGAAGAAGCcTACATTCCTAAAGAGCAG | |
| | | | AAGTACTCTTTCCTGCAAAACCCACAGA | |
| | | | CTTCTCTCTGCTTCAGCGAATCTATTCCG | |
| | | | ACGCCTTCCAATCGCGAGGAAACTCAG | |
| | | | CAAAAGTCCAATCTGGAACTACTCCGCA | |
| | | | TTTCTCTGCTTCTGATTCAGAGCTGGCT | |
| | | | AGAACCAGTGCAATTTCTGCGTTCCGTC | |
| | | | TTCGCCAATAGCCTAGTTTATGGCGCAT | |
| | | | CCGACAGCAACGTATACGATCTCCTGAA | |
| | | | AGATCTCGAGGAAGGCATTCAGACCCT | |
| | | | GATGGGTCGTCTCGAGGATGGCTCTCCG | |
| | | | CGTACTGGTCAGATCTTCAAGCAGACTT | |
| | | | ACTCTAAATTTGATACTAACAGCCACAA | |
| | | | TGACGATGCGCTTCTAAAAAACTATGGT | |
| | | | CTGCTGTATTGTTTTCGTAAAGATATGG | |
| | | | ACAAAGTTGAAACCTTCCTGCGTATTGT | |
| | | | TCAGTGTCGTTCCGTTGAGGGCAGCTGT | |
| | | | GGTTTCTAAGGTgcgccgctgggcctgcgcctgcgc | |
| | | | ggcggcGGTGGTACCTCTGAAAGCGCAAC | |
| | | | TCCTGAGTCTGGCCCAGGTAGCGAACCT | |
| | | | GCTACCTCCGGCTCTGAGACTCCAGGTA | |
| | | | CCTCTGAAAGCGCAACCCCGGAATCTG | |
| | | | GTCCAGGTAGCGAACCTGCAACCTCTGG | |
| | | | CTCTGAAACCCCAGGTACCTCTGAAAGC | |
| | | | GCTACTCCTGAATCTGGCCCAGGTACTT | |
| | | | CTACTGAACCGTCCGAGGGCAGCGCAC | |
| | | | CAGGTAGCCCTGCTGGCTCTCCAACCTC | |
| | | | CACCGAAGAAGGTACCTCTGAAAGCGC | |
| | | | AACCCCTGAATCCGGCCCAGGTAGCGA | |
| | | | ACCGGCAACCTCCGGTTCTGAAACCCCA | |
| | | | GGTACTTCTGAAAGCGCTACTCCTGAGT | |
| | | | CCGGCCCAGGTAGCCCGGCTGGCTCTCC | |
| | | | GACTTCCACCGAGGAAGGTAGCCCGGC | |
| | | | TGGCTCTCCAACTTCTACTGAAGAAGGT | |
| | | | ACTTCTACCGAACCTTCCGAGGGCAGCG | |
| | | | CACCAGGTACTTCTGAAAGCGCTACCCC | |
| | | | TGAGTCCGGCCCAGGTACTTCTGAAAGC | |
| | | | GCTACTCCTGAATCCGGTCCAGGTACTT | |
| | | | CTGAAAGCGCTACCCCGGAATCTGGCCC | |
| | | | AGGTAGCGAACCGGCTACTTCTGGTTCT | |
| | | | GAAACCCCAGGTAGCGAACCGGCTACC | |
| | | | TCCGGTTCTGAAACTCCAGGTAGCCCAG | |
| | | | CAGGCTCTCCGACTTCCACTGAGGAAGG | |
| | | | TACTTCTACTGAACCTTCCGAAGGCAGC | |
| | | | GCACCAGGTACCTCTACTGAACCTTCTG | |
| | | | AGGGCAGCGCTCCAGGTAGCGAACCTG | |
| | | | CAACCTCTGGCTCTGAAACCCCAGGTAC | |
| | | | CTCTGAAAGCGCTACTCCTGAATCTGGC | |
| | | | CCAGGTACTTCTACTGAACCGTCCGAGG | |
| | | | GCAGCGCACCA | |
| AE624- | MAEPAGSPTSTEEGT | 829 | ATGGCTGAACCTGCTGGCTCTCCAACCT | 830 |
| hGH- | PGSGTASSSPGSSTPS | | CCACTGAGGAAGGTACCCCGGGTAGCG | |
| Thrombin- | GATGSPGASPGTSST | | GTACTGCTTCTTCCTCTCCAGGTAGCTCT | |
| AE144 | GSPGSPAGSPTSTEE | | ACCCCTTCTGGTGCAACCGGCTCTCCAG | |
| | GTSESATPESGPGTS | | GTGCTTCTCCGGGCACCAGCTCTACCGG | |
| | TEPSEGSAPGSPAGS | | TTCTCCAGGTAGCCCGGCTGGCTCTCCT | |
| | PTSTEEGTSTEPSEGS | | ACCTCTACTGAGGAAGGTACTTCTGAAA | |
| | APGTSTEPSEGSAPG | | GCGCTACTCCTGAGTCTGGTCCAGGTAC | |
| | TSESATPESGPGSEP | | CTCTACTGAACCGTCCGAAGGTAGCGCT | |
| | ATSGSETPGSEPATS | | CCAGGTAGCCCAGCAGGCTCTCCGACTT | |
| | GSETPGSPAGSPTST | | CCACTGAGGAAGGTACTTCTACTGAACC | |
| | EEGTSESATPESGPG | | TTCCGAAGGCAGCGCACCAGGTACCTCT | |
| | TSTEPSEGSAPGTSTE | | ACTGAACCTTCTGAGGGCAGCGCTCCAG | |
| | PSEGSAPGSPAGSPT | | GTACTTCTGAAAGCGCTACCCCGGAATC | |
| | STEEGTSTEPSEGSAP | | TGGCCCAGGTAGCGAACCGGCTACTTCT | |
| | GTSTEPSEGSAPGTS | | GGTTCTGAAACCCCAGGTAGCGAACCG | |
| | ESATPESGPGTSTEPS | | GCTACCTCCGGTTCTGAAACTCCAGGTA | |
| | EGSAPGTSESATPES | | GCCCGGCAGGCTCTCCGACCTCTACTGA | |
| | GPGSEPATSGSETPG | | GGAAGGTACTTCTGAAAGCGCAACCCC | |
| | TSTEPSEGSAPGTSTE | | GGAGTCCGGCCCAGGTACCTCTACCGA | |
| | PSEGSAPGTSESATP | | ACCGTCTGAGGGCAGCGCACCAGGTAC | |
| | ESGPGTSESATPESG | | TTCTACCGAACCGTCCGAGGGTAGCGCA | |
| | PGSPAGSPTSTEEGT | | CCAGGTAGCCCAGCAGGTTCTCCTACCT | |
| | SESATPESGPGSEPA | | CCACCGAGGAAGGTACTTCTACCGAAC | |
| | TSGSETPGTSESATPE | | CGTCCGAGGGTAGCGCACCAGGTACCT | |
| | SGPGTSTEPSEGSAP | | CTACTGAACCTTCTGAGGGCAGCGCTCC | |
| | GTSTEPSEGSAPGTS | | AGGTACTTCTGAAAGCGCTACCCCGGA | |
| | TEPSEGSAPGTSTEPS | | GTCCGGTCCAGGTACTTCTACTGAACCG | |
| | EGSAPGTSTEPSEGS | | TCCGAAGGTAGCGCACCAGGTACTTCTG | |
| | APGTSTEPSEGSAPG | | AAAGCGCAACCCCTGAATCCGGTCCAG | |
| | SPAGSPTSTEEGTSTE | | GTAGCGAACCGGCTACTTCTGGCTCTGA | |
| | PSEGSAPGTSESATP | | GACTCCAGGTACTTCTACCGAACCGTCC | |
| | ESGPGSEPATSGSET | | GAAGGTAGCGCACCAGGTACTTCTACTG | |
| | PGTSESATPESGPGS | | AACCGTCTGAAGGTAGCGCACCAGGTA | |
| | EPATSGSETPGTSES | | CTTCTGAAAGCGCAACCCCGGAATCCG | |
| | ATPESGPGTSTEPSE | | GCCCAGGTACCTCTGAAAGCGCAACCC | |
| | GSAPGTSESATPESG | | CGGAGTCCGGCCCAGGTAGCCCTGCTG | |
| | PGSPAGSPTSTEEGSP | | GCTCTCCAACCTCCACCGAAGAAGGTAC | |
| | AGSPTSTEEGSPAGS | | CTCTGAAAGCGCAACCCCTGAATCCGGC | |
| | PTSTEEGTSESATPES | | CCAGGTAGCGAACCGGCAACCTCCGGT | |
| | GPGTSTEPSEGSAPG | | TCTGAAACCCCAGGTACCTCTGAAAGCG | |
| | FPTIPLSRLFDNAML | | CTACTCCGGAGTCTGGCCCAGGTACCTC | |
| | RAHRLHQLAFDTYQ | | TACTGAACCGTCTGAGGGTAGCGCTCCA | |
| | EFEEAYIPKEQKYSF | | GGTACTTCTACTGAACCGTCCGAAGGTA | |
| | LQNPQTSLCFSESIPT | | GCGCACCAGGTACTTCTACCGAACCGTC | |
| | PSNREETQQKSNLEL | | CGAAGGCAGCGCTCCAGGTACCTCTACT | |
| | LRISLLLIQSWLEPVQ | | GAACCTTCCGAGGGCAGCGCTCCAGGT | |
| | FLRSVFANSLVYGAS | | ACCTCTACCGAACCTTCTGAAGGTAGCG | |
| | DSNVYDLLKDLEEGI | | CACCAGGTACTTCTACCGAACCGTCCGA | |
| | QTLMGRLEDGSPRT | | GGGTAGCGCACCAGGTAGCCCAGCAGG | |
| | GQIFKQTYSKFDTNS | | TTCTCCTACCTCCACCGAGGAAGGTACT | |
| | HNDDALLKNYGLLY | | TCTACCGAACCGTCCGAGGGTAGCGCA | |
| | CFRKDMDKVETFLRI | | CCAGGTACCTCTGAAAGCGCAACTCCTG | |
| | VQCRSVEGSCGFGL | | AGTCTGGCCCAGGTAGCGAACCTGCTAC | |
| | TPRSLLVGGGGSEPA | | CTCCGGCTCTGAGACTCCAGGTACCTCT | |
| | TSGSETPGTSESATPE | | GAAAGCGCAACCCCGGAATCTGGTCCA | |
| | SGPGSEPATSGSETP | | GGTAGCGAACCTGCAACCTCTGGCTCTG | |
| | GSPAGSPTSTEEGTS | | AAACCCCAGGTACCTCTGAAAGCGCTA | |
| | TEPSEGSAPGSEPAT | | CTCCTGAATCTGGCCCAGGTACTTCTAC | |
| | SGSETPGSEPATSGS | | TGAACCGTCCGAGGGCAGCGCACCAGG | |
| | ETPGSEPATSGSETP | | TACTTCTGAAAGCGCTACTCCTGAGTCC | |
| | GTSTEPSEGSAPGTS | | GGCCCAGGTAGCCCGGCTGGCTCTCCGA | |
| | ESATPESGPGSEPAT | | CTTCCACCGAGGAAGGTAGCCCGGCTG | |
| | SGSETPGTSTEPSEGS | | GCTCTCCAACTTCTACTGAAGAAGGTAG | |
| | AP | | CCCGGCAGGCTCTCCGACCTCTACTGAG | |
| | | | GAAGGTACTTCTGAAAGCGCAACCCCG | |
| | | | GAGTCCGGCCCAGGTACCTCTACCGAAC | |
| | | | CGTCTGAGGGCAGCGCACCAGGTTTTCC | |
| | | | GACTATTCCGCTGTCTCGTCTGTTTGAT | |
| | | | AATGCTATGCTGCGTGCGCACCGTCTGC | |
| | | | ACCAGCTGGCCTTTGATACTTACCAGGA | |
| | | | ATTTGAAGAAGCcTACATTCCTAAAGAG | |
| | | | CAGAAGTACTCTTTCCTGCAAAACCCAC | |
| | | | AGACTTCTCTCTGCTTCAGCGAATCTAT | |
| | | | TCCGACGCCTTCCAATCGCGAGGAAACT | |
| | | | CAGCAAAAGTCCAATCTGGAACTACTCC | |
| | | | GCATTTCTCTGCTTCTGATTCAGAGCTG | |
| | | | GCTAGAACCAGTGCAATTTCTGCGTTCC | |
| | | | GTCTTCGCCAATAGCCTAGTTTATGGCG | |
| | | | CATCCGACAGCAACGTATACGATCTCCT | |
| | | | GAAAGATCTCGAGGAAGGCATTCAGAC | |
| | | | CCTGATGGGTCGTCTCGAGGATGGCTCT | |
| | | | CCGCGTACTGGTCAGATCTTCAAGCAGA | |
| | | | CTTACTCTAAATTTGATACTAACAGCCA | |
| | | | CAATGACGATGCGCTTCTAAAAAACTAT | |
| | | | GGTCTGCTGTATTGTTTTCGTAAAGATA | |
| | | | TGGACAAAGTTGAAACCTTCCTGCGTAT | |
| | | | TGTTCAGTGTCGTTCCGTTGAGGGCAGC | |
| | | | TGTGGTTTCTAAGGTctgaccccgcgcagcctgctg | |
| | | | gtgggcggcGGTGGTAGCGAACCGGCAACT | |
| | | | TCCGGCTCTGAAACCCCAGGTACTTCTG | |
| | | | AAAGCGCTACTCCTGAGTCTGGCCCAGG | |
| | | | TAGCGAACCTGCTACCTCTGGCTCTGAA | |
| | | | ACCCCAGGTAGCCCGGCAGGCTCTCCG | |
| | | | ACTTCCACCGAGGAAGGTACCTCTACTG | |
| | | | AACCTTCTGAGGGTAGCGCTCCAGGTAG | |
| | | | CGAACCGGCAACCTCTGGCTCTGAAACC | |
| | | | CCAGGTAGCGAACCTGCTACCTCCGGCT | |
| | | | CTGAAACTCCAGGTAGCGAACCGGCTA | |
| | | | CTTCCGGTTCTGAAACTCCAGGTACCTC | |
| | | | TACCGAACCTTCCGAAGGCAGCGCACC | |
| | | | AGGTACTTCTGAAAGCGCAACCCCTGA | |
| | | | ATCCGGTCCAGGTAGCGAACCGGCTACT | |
| | | | TCTGGCTCTGAGACTCCAGGTACTTCTA | |
| | | | CCGAACCGTCCGAAGGTAGCGCACCA | |
| AE624- | MAEPAGSPTSTEEGT | 831 | ATGGCTGAACCTGCTGGCTCTCCAACCT | 832 |
| hGH- | PGSGTASSSPGSSTPS | | CCACTGAGGAAGGTACCCCGGGTAGCG | |
| FXIa- | GATGSPGASPGTSST | | GTACTGCTTCTTCCTCTCCAGGTAGCTCT | |
| AE144 | GSPGSPAGSPTSTEE | | ACCCCTTCTGGTGCAACCGGCTCTCCAG | |
| | GTSESATPESGPGTS | | GTGCTTCTCCGGGCACCAGCTCTACCGG | |
| | TEPSEGSAPGSPAGS | | TTCTCCAGGTAGCCCGGCTGGCTCTCCT | |
| | PTSTEEGTSTEPSEGS | | ACCTCTACTGAGGAAGGTACTTCTGAAA | |
| | APGTSTEPSEGSAPG | | GCGCTACTCCTGAGTCTGGTCCAGGTAC | |
| | TSESATPESGPGSEP | | CTCTACTGAACCGTCCGAAGGTAGCGCT | |
| | ATSGSETPGSEPATS | | CCAGGTAGCCCAGCAGGCTCTCCGACTT | |
| | GSETPGSPAGSPTST | | CCACTGAGGAAGGTACTTCTACTGAACC | |
| | EEGTSESATPESGPG | | TTCCGAAGGCAGCGCACCAGGTACCTCT | |
| | TSTEPSEGSAPGTSTE | | ACTGAACCTTCTGAGGGCAGCGCTCCAG | |
| | PSEGSAPGSPAGSPT | | GTACTTCTGAAAGCGCTACCCCGGAATC | |
| | STEEGTSTEPSEGSAP | | TGGCCCAGGTAGCGAACCGGCTACTTCT | |
| | GTSTEPSEGSAPGTS | | GGTTCTGAAACCCCAGGTAGCGAACCG | |
| | ESATPESGPGTSTEPS | | GCTACCTCCGGTTCTGAAACTCCAGGTA | |
| | EGSAPGTSESATPES | | GCCCGGCAGGCTCTCCGACCTCTACTGA | |
| | GPGSEPATSGSETPG | | GGAAGGTACTTCTGAAAGCGCAACCCC | |
| | TSTEPSEGSAPGTSTE | | GGAGTCCGGCCCAGGTACCTCTACCGA | |
| | PSEGSAPGTSESATP | | ACCGTCTGAGGGCAGCGCACCAGGTAC | |
| | ESGPGTSESATPESG | | TTCTACCGAACCGTCCGAGGGTAGCGCA | |
| | PGSPAGSPTSTEEGT | | CCAGGTAGCCCAGCAGGTTCTCCTACCT | |
| | SESATPESGPGSEPA | | CCACCGAGGAAGGTACTTCTACCGAAC | |
| | TSGSETPGTSESATPE | | CGTCCGAGGGTAGCGCACCAGGTACCT | |
| | SGPGTSTEPSEGSAP | | CTACTGAACCTTCTGAGGGCAGCGCTCC | |
| | GTSTEPSEGSAPGTS | | AGGTACTTCTGAAAGCGCTACCCCGGA | |
| | TEPSEGSAPGTSTEPS | | GTCCGGTCCAGGTACTTCTACTGAACCG | |
| | EGSAPGTSTEPSEGS | | TCCGAAGGTAGCGCACCAGGTACTTCTG | |
| | APGTSTEPSEGSAPG | | AAAGCGCAACCCCTGAATCCGGTCCAG | |
| | SPAGSPTSTEEGTSTE | | GTAGCGAACCGGCTACTTCTGGCTCTGA | |
| | PSEGSAPGTSESATP | | GACTCCAGGTACTTCTACCGAACCGTCC | |
| | ESGPGSEPATSGSET | | GAAGGTAGCGCACCAGGTACTTCTACTG | |
| | PGTSESATPESGPGS | | AACCGTCTGAAGGTAGCGCACCAGGTA | |
| | EPATSGSETPGTSES | | CTTCTGAAAGCGCAACCCCGGAATCCG | |
| | ATPESGPGTSTEPSE | | GCCCAGGTACCTCTGAAAGCGCAACCC | |
| | GSAPGTSESATPESG | | CGGAGTCCGGCCCAGGTAGCCCTGCTG | |
| | PGSPAGSPTSTEEGSP | | GCTCTCCAACCTCCACCGAAGAAGGTAC | |
| | AGSPTSTEEGSPAGS | | CTCTGAAAGCGCAACCCCTGAATCCGGC | |
| | PTSTEEGTSESATPES | | CCAGGTAGCGAACCGGCAACCTCCGGT | |
| | GPGTSTEPSEGSAPG | | TCTGAAACCCCAGGTACCTCTGAAAGCG | |
| | FPTIPLSRLFDNAML | | CTACTCCGGAGTCTGGCCCAGGTACCTC | |
| | RAHRLHQLAFDTYQ | | TACTGAACCGTCTGAGGGTAGCGCTCCA | |
| | EFEEAYIPKEQKYSF | | GGTACTTCTACTGAACCGTCCGAAGGTA | |
| | LQNPQTSLCFSESIPT | | GCGCACCAGGTACTTCTACCGAACCGTC | |
| | PSNREETQQKSNLEL | | CGAAGGCAGCGCTCCAGGTACCTCTACT | |
| | LRISLLLIQSWLEPVQ | | GAACCTTCCGAGGGCAGCGCTCCAGGT | |
| | FLRSVFANSLVYGAS | | ACCTCTACCGAACCTTCTGAAGGTAGCG | |
| | DSNVYDLLKDLEEGI | | CACCAGGTACTTCTACCGAACCGTCCGA | |
| | QTLMGRLEDGSPRT | | GGGTAGCGCACCAGGTAGCCCAGCAGG | |
| | GQIFKQTYSKFDTNS | | TTCTCCTACCTCCACCGAGGAAGGTACT | |
| | HNDDALLKNYGLLY | | TCTACCGAACCGTCCGAGGGTAGCGCA | |
| | CFRKDMDKVETFLRI | | CCAGGTACCTCTGAAAGCGCAACTCCTG | |
| | VQCRSVEGSCGFGG | | AGTCTGGCCCAGGTAGCGAACCTGCTAC | |
| | GKLTRVVGGGGSEP | | CTCCGGCTCTGAGACTCCAGGTACCTCT | |
| | ATSGSETPGTSESAT | | GAAAGCGCAACCCCGGAATCTGGTCCA | |
| | PESGPGSEPATSGSE | | GGTAGCGAACCTGCAACCTCTGGCTCTG | |
| | TPGSPAGSPTSTEEG | | AAACCCCAGGTACCTCTGAAAGCGCTA | |
| | TSTEPSEGSAPGSEP | | CTCCTGAATCTGGCCCAGGTACTTCTAC | |
| | ATSGSETPGSEPATS | | TGAACCGTCCGAGGGCAGCGCACCAGG | |
| | GSETPGSEPATSGSE | | TACTTCTGAAAGCGCTACTCCTGAGTCC | |
| | TPGTSTEPSEGSAPG | | GGCCCAGGTAGCCCGGCTGGCTCTCCGA | |
| | TSESATPESGPGSEP | | CTTCCACCGAGGAAGGTAGCCCGGCTG | |
| | ATSGSETPGTSTEPSE | | GCTCTCCAACTTCTACTGAAGAAGGTAG | |
| | GSAP | | CCCGGCAGGCTCTCCGACCTCTACTGAG | |
| | | | GAAGGTACTTCTGAAAGCGCAACCCCG | |
| | | | GAGTCCGGCCCAGGTACCTCTACCGAAC | |
| | | | CGTCTGAGGGCAGCGCACCAGGTTTTCC | |
| | | | GACTATTCCGCTGTCTCGTCTGTTTGAT | |
| | | | AATGCTATGCTGCGTGCGCACCGTCTGC | |
| | | | ACCAGCTGGCCTTTGATACTTACCAGGA | |
| | | | ATTTGAAGAAGCcTACATTCCTAAAGAG | |
| | | | CAGAAGTACTCTTTCCTGCAAAACCCAC | |
| | | | AGACTTCTCTCTGCTTCAGCGAATCTAT | |
| | | | TCCGACGCCTTCCAATCGCGAGGAAACT | |
| | | | CAGCAAAAGTCCAATCTGGAACTACTCC | |
| | | | GCATTTCTCTGCTTCTGATTCAGAGCTG | |
| | | | GCTAGAACCAGTGCAATTTCTGCGTTCC | |
| | | | GTCTTCGCCAATAGCCTAGTTTATGGCG | |
| | | | CATCCGACAGCAACGTATACGATCTCCT | |
| | | | GAAAGATCTCGAGGAAGGCATTCAGAC | |
| | | | CCTGATGGGTCGTCTCGAGGATGGCTCT | |
| | | | CCGCGTACTGGTCAGATCTTCAAGCAGA | |
| | | | CTTACTCTAAATTTGATACTAACAGCCA | |
| | | | CAATGACGATGCGCTTCTAAAAAACTAT | |
| | | | GGTCTGCTGTATTGTTTTCGTAAAGATA | |
| | | | TGGACAAAGTTGAAACCTTCCTGCGTAT | |
| | | | TGTTCAGTGTCGTTCCGTTGAGGGCAGC | |
| | | | TGTGGTTTCTAAGGTggcggcaaactgacccgcgt | |
| | | | ggtgggcggcGGTGGTAGCGAACCGGCAAC | |
| | | | TTCCGGCTCTGAAACCCCAGGTACTTCT | |
| | | | GAAAGCGCTACTCCTGAGTCTGGCCCAG | |
| | | | GTAGCGAACCTGCTACCTCTGGCTCTGA | |
| | | | AACCCCAGGTAGCCCGGCAGGCTCTCC | |
| | | | GACTTCCACCGAGGAAGGTACCTCTACT | |
| | | | GAACCTTCTGAGGGTAGCGCTCCAGGTA | |
| | | | GCGAACCGGCAACCTCTGGCTCTGAAA | |
| | | | CCCCAGGTAGCGAACCTGCTACCTCCGG | |
| | | | CTCTGAAACTCCAGGTAGCGAACCGGCT | |
| | | | ACTTCCGGTTCTGAAACTCCAGGTACCT | |
| | | | CTACCGAACCTTCCGAAGGCAGCGCAC | |
| | | | CAGGTACTTCTGAAAGCGCAACCCCTGA | |
| | | | ATCCGGTCCAGGTAGCGAACCGGCTACT | |
| | | | TCTGGCTCTGAGACTCCAGGTACTTCTA | |
| | | | CCGAACCGTCCGAAGGTAGCGCACCA | |
| AE624- | MAEPAGSPTSTEEGT | 833 | ATGGCTGAACCTGCTGGCTCTCCAACCT | 834 |
| hGH- | PGSGTASSSPGSSTPS | | CCACTGAGGAAGGTACCCCGGGTAGCG | |
| Elastase- | GATGSPGASPGTSST | | GTACTGCTTCTTCCTCTCCAGGTAGCTCT | |
| AE144 | GSPGSPAGSPTSTEE | | ACCCCTTCTGGTGCAACCGGCTCTCCAG | |
| | GTSESATPESGPGTS | | GTGCTTCTCCGGGCACCAGCTCTACCGG | |
| | TEPSEGSAPGSPAGS | | TTCTCCAGGTAGCCCGGCTGGCTCTCCT | |
| | PTSTEEGTSTEPSEGS | | ACCTCTACTGAGGAAGGTACTTCTGAAA | |
| | APGTSTEPSEGSAPG | | GCGCTACTCCTGAGTCTGGTCCAGGTAC | |
| | TSESATPESGPGSEP | | CTCTACTGAACCGTCCGAAGGTAGCGCT | |
| | ATSGSETPGSEPATS | | CCAGGTAGCCCAGCAGGCTCTCCGACTT | |
| | GSETPGSPAGSPTST | | CCACTGAGGAAGGTACTTCTACTGAACC | |
| | EEGTSESATPESGPG | | TTCCGAAGGCAGCGCACCAGGTACCTCT | |
| | TSTEPSEGSAPGTSTE | | ACTGAACCTTCTGAGGGCAGCGCTCCAG | |
| | PSEGSAPGSPAGSPT | | GTACTTCTGAAAGCGCTACCCCGGAATC | |
| | STEEGTSTEPSEGSAP | | TGGCCCAGGTAGCGAACCGGCTACTTCT | |
| | GTSTEPSEGSAPGTS | | GGTTCTGAAACCCCAGGTAGCGAACCG | |
| | ESATPESGPGTSTEPS | | GCTACCTCCGGTTCTGAAACTCCAGGTA | |
| | EGSAPGTSESATPES | | GCCCGGCAGGCTCTCCGACCTCTACTGA | |
| | GPGSEPATSGSETPG | | GGAAGGTACTTCTGAAAGCGCAACCCC | |
| | TSTEPSEGSAPGTSTE | | GGAGTCCGGCCCAGGTACCTCTACCGA | |
| | PSEGSAPGTSESATP | | ACCGTCTGAGGGCAGCGCACCAGGTAC | |
| | ESGPGTSESATPESG | | TTCTACCGAACCGTCCGAGGGTAGCGCA | |
| | PGSPAGSPTSTEEGT | | CCAGGTAGCCCAGCAGGTTCTCCTACCT | |
| | SESATPESGPGSEPA | | CCACCGAGGAAGGTACTTCTACCGAAC | |
| | TSGSETPGTSESATPE | | CGTCCGAGGGTAGCGCACCAGGTACCT | |
| | SGPGTSTEPSEGSAP | | CTACTGAACCTTCTGAGGGCAGCGCTCC | |
| | GTSTEPSEGSAPGTS | | AGGTACTTCTGAAAGCGCTACCCCGGA | |
| | TEPSEGSAPGTSTEPS | | GTCCGGTCCAGGTACTTCTACTGAACCG | |
| | EGSAPGTSTEPSEGS | | TCCGAAGGTAGCGCACCAGGTACTTCTG | |
| | APGTSTEPSEGSAPG | | AAAGCGCAACCCCTGAATCCGGTCCAG | |
| | SPAGSPTSTEEGTSTE | | GTAGCGAACCGGCTACTTCTGGCTCTGA | |
| | PSEGSAPGTSESATP | | GACTCCAGGTACTTCTACCGAACCGTCC | |
| | ESGPGSEPATSGSET | | GAAGGTAGCGCACCAGGTACTTCTACTG | |
| | PGTSESATPESGPGS | | AACCGTCTGAAGGTAGCGCACCAGGTA | |
| | EPATSGSETPGTSES | | CTTCTGAAAGCGCAACCCCGGAATCCG | |
| | ATPESGPGTSTEPSE | | GCCCAGGTACCTCTGAAAGCGCAACCC | |
| | GSAPGTSESATPESG | | CGGAGTCCGGCCCAGGTAGCCCTGCTG | |
| | PGSPAGSPTSTEEGSP | | GCTCTCCAACCTCCACCGAAGAAGGTAC | |
| | AGSPTSTEEGSPAGS | | CTCTGAAAGCGCAACCCCTGAATCCGGC | |
| | PTSTEEGTSESATPES | | CCAGGTAGCGAACCGGCAACCTCCGGT | |
| | GPGTSTEPSEGSAPG | | TCTGAAACCCCAGGTACCTCTGAAAGCG | |
| | FPTIPLSRLFDNAML | | CTACTCCGGAGTCTGGCCCAGGTACCTC | |
| | RAHRLHQLAFDTYQ | | TACTGAACCGTCTGAGGGTAGCGCTCCA | |
| | EFEEAYIPKEQKYSF | | GGTACTTCTACTGAACCGTCCGAAGGTA | |
| | LQNPQTSLCFSESIPT | | GCGCACCAGGTACTTCTACCGAACCGTC | |
| | PSNREETQQKSNLEL | | CGAAGGCAGCGCTCCAGGTACCTCTACT | |
| | LRISLLLIQSWLEPVQ | | GAACCTTCCGAGGGCAGCGCTCCAGGT | |
| | FLRSVFANSLVYGAS | | ACCTCTACCGAACCTTCTGAAGGTAGCG | |
| | DSNVYDLLKDLEEGI | | CACCAGGTACTTCTACCGAACCGTCCGA | |
| | QTLMGRLEDGSPRT | | GGGTAGCGCACCAGGTAGCCCAGCAGG | |
| | GQIFKQTYSKFDTNS | | TTCTCCTACCTCCACCGAGGAAGGTACT | |
| | HNDDALLKNYGLLY | | TCTACCGAACCGTCCGAGGGTAGCGCA | |
| | CFRKDMDKVETFLRI | | CCAGGTACCTCTGAAAGCGCAACTCCTG | |
| | VQCRSVEGSCGFGG | | AGTCTGGCCCAGGTAGCGAACCTGCTAC | |
| | GLGPVSGVPGGSEPA | | CTCCGGCTCTGAGACTCCAGGTACCTCT | |
| | TSGSETPGTSESATPE | | GAAAGCGCAACCCCGGAATCTGGTCCA | |
| | SGPGSEPATSGSETP | | GGTAGCGAACCTGCAACCTCTGGCTCTG | |
| | GSPAGSPTSTEEGTS | | AAACCCCAGGTACCTCTGAAAGCGCTA | |
| | TEPSEGSAPGSEPAT | | CTCCTGAATCTGGCCCAGGTACTTCTAC | |
| | SGSETPGSEPATSGS | | TGAACCGTCCGAGGGCAGCGCACCAGG | |
| | ETPGSEPATSGSETP | | TACTTCTGAAAGCGCTACTCCTGAGTCC | |
| | GTSTEPSEGSAPGTS | | GGCCCAGGTAGCCCGGCTGGCTCTCCGA | |
| | ESATPESGPGSEPAT | | CTTCCACCGAGGAAGGTAGCCCGGCTG | |
| | SGSETPGTSTEPSEGS | | GCTCTCCAACTTCTACTGAAGAAGGTAG | |
| | AP | | CCCGGCAGGCTCTCCGACCTCTACTGAG | |
| | | | GAAGGTACTTCTGAAAGCGCAACCCCG | |
| | | | GAGTCCGGCCCAGGTACCTCTACCGAAC | |
| | | | CGTCTGAGGGCAGCGCACCAGGTTTTCC | |
| | | | GACTATTCCGCTGTCTCGTCTGTTTGAT | |
| | | | AATGCTATGCTGCGTGCGCACCGTCTGC | |
| | | | ACCAGCTGGCCTTTGATACTTACCAGGA | |
| | | | ATTTGAAGAAGCcTACATTCCTAAAGAG | |
| | | | CAGAAGTACTCTTTCCTGCAAAACCCAC | |
| | | | AGACTTCTCTCTGCTTCAGCGAATCTAT | |
| | | | TCCGACGCCTTCCAATCGCGAGGAAACT | |
| | | | CAGCAAAAGTCCAATCTGGAACTACTCC | |
| | | | GCATTTCTCTGCTTCTGATTCAGAGCTG | |
| | | | GCTAGAACCAGTGCAATTTCTGCGTTCC | |
| | | | GTCTTCGCCAATAGCCTAGTTTATGGCG | |
| | | | CATCCGACAGCAACGTATACGATCTCCT | |
| | | | GAAAGATCTCGAGGAAGGCATTCAGAC | |
| | | | CCTGATGGGTCGTCTCGAGGATGGCTCT | |
| | | | CCGCGTACTGGTCAGATCTTCAAGCAGA | |
| | | | CTTACTCTAAATTTGATACTAACAGCCA | |
| | | | CAATGACGATGCGCTTCTAAAAAACTAT | |
| | | | GGTCTGCTGTATTGTTTTCGTAAAGATA | |
| | | | TGGACAAAGTTGAAACCTTCCTGCGTAT | |
| | | | TGTTCAGTGTCGTTCCGTTGAGGGCAGC | |
| | | | TGTGGTTTCTAAGGTggcggcctgggcccggtgag | |
| | | | cggcgtgccgGGTGGTAGCGAACCGGCAACT | |
| | | | TCCGGCTCTGAAACCCCAGGTACTTCTG | |
| | | | AAAGCGCTACTCCTGAGTCTGGCCCAGG | |
| | | | TAGCGAACCTGCTACCTCTGGCTCTGAA | |
| | | | ACCCCAGGTAGCCCGGCAGGCTCTCCG | |
| | | | ACTTCCACCGAGGAAGGTACCTCTACTG | |
| | | | AACCTTCTGAGGGTAGCGCTCCAGGTAG | |
| | | | CGAACCGGCAACCTCTGGCTCTGAAACC | |
| | | | CCAGGTAGCGAACCTGCTACCTCCGGCT | |
| | | | CTGAAACTCCAGGTAGCGAACCGGCTA | |
| | | | CTTCCGGTTCTGAAACTCCAGGTACCTC | |
| | | | TACCGAACCTTCCGAAGGCAGCGCACC | |
| | | | AGGTACTTCTGAAAGCGCAACCCCTGA | |
| | | | ATCCGGTCCAGGTAGCGAACCGGCTACT | |
| | | | TCTGGCTCTGAGACTCCAGGTACTTCTA | |
| | | | CCGAACCGTCCGAAGGTAGCGCACCA | |
| AE624- | MAEPAGSPTSTEEGT | 835 | ATGGCTGAACCTGCTGGCTCTCCAACCT | 836 |
| hGH- | PGSGTASSSPGSSTPS | | CCACTGAGGAAGGTACCCCGGGTAGCG | |
| MMP-17- | GATGSPGASPGTSST | | GTACTGCTTCTTCCTCTCCAGGTAGCTCT | |
| AE144 | GSPGSPAGSPTSTEE | | ACCCCTTCTGGTGCAACCGGCTCTCCAG | |
| | GTSESATPESGPGTS | | GTGCTTCTCCGGGCACCAGCTCTACCGG | |
| | TEPSEGSAPGSPAGS | | TTCTCCAGGTAGCCCGGCTGGCTCTCCT | |
| | PTSTEEGTSTEPSEGS | | ACCTCTACTGAGGAAGGTACTTCTGAAA | |
| | APGTSTEPSEGSAPG | | GCGCTACTCCTGAGTCTGGTCCAGGTAC | |
| | TSESATPESGPGSEP | | CTCTACTGAACCGTCCGAAGGTAGCGCT | |
| | ATSGSETPGSEPATS | | CCAGGTAGCCCAGCAGGCTCTCCGACTT | |
| | GSETPGSPAGSPTST | | CCACTGAGGAAGGTACTTCTACTGAACC | |
| | EEGTSESATPESGPG | | TTCCGAAGGCAGCGCACCAGGTACCTCT | |
| | TSTEPSEGSAPGTSTE | | ACTGAACCTTCTGAGGGCAGCGCTCCAG | |
| | PSEGSAPGSPAGSPT | | GTACTTCTGAAAGCGCTACCCCGGAATC | |
| | STEEGTSTEPSEGSAP | | TGGCCCAGGTAGCGAACCGGCTACTTCT | |
| | GTSTEPSEGSAPGTS | | GGTTCTGAAACCCCAGGTAGCGAACCG | |
| | ESATPESGPGTSTEPS | | GCTACCTCCGGTTCTGAAACTCCAGGTA | |
| | EGSAPGTSESATPES | | GCCCGGCAGGCTCTCCGACCTCTACTGA | |
| | GPGSEPATSGSETPG | | GGAAGGTACTTCTGAAAGCGCAACCCC | |
| | TSTEPSEGSAPGTSTE | | GGAGTCCGGCCCAGGTACCTCTACCGA | |
| | PSEGSAPGTSESATP | | ACCGTCTGAGGGCAGCGCACCAGGTAC | |
| | ESGPGTSESATPESG | | TTCTACCGAACCGTCCGAGGGTAGCGCA | |
| | PGSPAGSPTSTEEGT | | CCAGGTAGCCCAGCAGGTTCTCCTACCT | |
| | SESATPESGPGSEPA | | CCACCGAGGAAGGTACTTCTACCGAAC | |
| | TSGSETPGTSESATPE | | CGTCCGAGGGTAGCGCACCAGGTACCT | |
| | SGPGTSTEPSEGSAP | | CTACTGAACCTTCTGAGGGCAGCGCTCC | |
| | GTSTEPSEGSAPGTS | | AGGTACTTCTGAAAGCGCTACCCCGGA | |
| | TEPSEGSAPGTSTEPS | | GTCCGGTCCAGGTACTTCTACTGAACCG | |
| | EGSAPGTSTEPSEGS | | TCCGAAGGTAGCGCACCAGGTACTTCTG | |
| | APGTSTEPSEGSAPG | | AAAGCGCAACCCCTGAATCCGGTCCAG | |
| | SPAGSPTSTEEGTSTE | | GTAGCGAACCGGCTACTTCTGGCTCTGA | |
| | PSEGSAPGTSESATP | | GACTCCAGGTACTTCTACCGAACCGTCC | |
| | ESGPGSEPATSGSET | | GAAGGTAGCGCACCAGGTACTTCTACTG | |
| | PGTSESATPESGPGS | | AACCGTCTGAAGGTAGCGCACCAGGTA | |
| | EPATSGSETPGTSES | | CTTCTGAAAGCGCAACCCCGGAATCCG | |
| | ATPESGPGTSTEPSE | | GCCCAGGTACCTCTGAAAGCGCAACCC | |
| | GSAPGTSESATPESG | | CGGAGTCCGGCCCAGGTAGCCCTGCTG | |
| | PGSPAGSPTSTEEGSP | | GCTCTCCAACCTCCACCGAAGAAGGTAC | |
| | AGSPTSTEEGSPAGS | | CTCTGAAAGCGCAACCCCTGAATCCGGC | |
| | PTSTEEGTSESATPES | | CCAGGTAGCGAACCGGCAACCTCCGGT | |
| | GPGTSTEPSEGSAPG | | TCTGAAACCCCAGGTACCTCTGAAAGCG | |
| | FPTIPLSRLFDNAML | | CTACTCCGGAGTCTGGCCCAGGTACCTC | |
| | RAHRLHQLAFDTYQ | | TACTGAACCGTCTGAGGGTAGCGCTCCA | |
| | EFEEAYIPKEQKYSF | | GGTACTTCTACTGAACCGTCCGAAGGTA | |
| | LQNPQTSLCFSESIPT | | GCGCACCAGGTACTTCTACCGAACCGTC | |
| | PSNREETQQKSNLEL | | CGAAGGCAGCGCTCCAGGTACCTCTACT | |
| | LRISLLLIQSWLEPVQ | | GAACCTTCCGAGGGCAGCGCTCCAGGT | |
| | FLRSVFANSLVYGAS | | ACCTCTACCGAACCTTCTGAAGGTAGCG | |
| | DSNVYDLLKDLEEGI | | CACCAGGTACTTCTACCGAACCGTCCGA | |
| | QTLMGRLEDGSPRT | | GGGTAGCGCACCAGGTAGCCCAGCAGG | |
| | GQIFKQTYSKFDTNS | | TTCTCCTACCTCCACCGAGGAAGGTACT | |
| | HNDDALLKNYGLLY | | TCTACCGAACCGTCCGAGGGTAGCGCA | |
| | CFRKDMDKVETFLRI | | CCAGGTACCTCTGAAAGCGCAACTCCTG | |
| | VQCRSVEGSCGFGA | | AGTCTGGCCCAGGTAGCGAACCTGCTAC | |
| | PLGLRLRGGGGSEPA | | CTCCGGCTCTGAGACTCCAGGTACCTCT | |
| | TSGSETPGTSESATPE | | GAAAGCGCAACCCCGGAATCTGGTCCA | |
| | SGPGSEPATSGSETP | | GGTAGCGAACCTGCAACCTCTGGCTCTG | |
| | GSPAGSPTSTEEGTS | | AAACCCCAGGTACCTCTGAAAGCGCTA | |
| | TEPSEGSAPGSEPAT | | CTCCTGAATCTGGCCCAGGTACTTCTAC | |
| | SGSETPGSEPATSGS | | TGAACCGTCCGAGGGCAGCGCACCAGG | |
| | ETPGSEPATSGSETP | | TACTTCTGAAAGCGCTACTCCTGAGTCC | |
| | GTSTEPSEGSAPGTS | | GGCCCAGGTAGCCCGGCTGGCTCTCCGA | |
| | ESATPESGPGSEPAT | | CTTCCACCGAGGAAGGTAGCCCGGCTG | |
| | SGSETPGTSTEPSEGS | | GCTCTCCAACTTCTACTGAAGAAGGTAG | |
| | AP | | CCCGGCAGGCTCTCCGACCTCTACTGAG | |
| | | | GAAGGTACTTCTGAAAGCGCAACCCCG | |
| | | | GAGTCCGGCCCAGGTACCTCTACCGAAC | |
| | | | CGTCTGAGGGCAGCGCACCAGGTTTTCC | |
| | | | GACTATTCCGCTGTCTCGTCTGTTTGAT | |
| | | | AATGCTATGCTGCGTGCGCACCGTCTGC | |
| | | | ACCAGCTGGCCTTTGATACTTACCAGGA | |
| | | | ATTTGAAGAAGCcTACATTCCTAAAGAG | |
| | | | CAGAAGTACTCTTTCCTGCAAAACCCAC | |
| | | | AGACTTCTCTCTGCTTCAGCGAATCTAT | |
| | | | TCCGACGCCTTCCAATCGCGAGGAAACT | |
| | | | CAGCAAAAGTCCAATCTGGAACTACTCC | |
| | | | GCATTTCTCTGCTTCTGATTCAGAGCTG | |
| | | | GCTAGAACCAGTGCAATTTCTGCGTTCC | |
| | | | GTCTTCGCCAATAGCCTAGTTTATGGCG | |
| | | | CATCCGACAGCAACGTATACGATCTCCT | |
| | | | GAAAGATCTCGAGGAAGGCATTCAGAC | |
| | | | CCTGATGGGTCGTCTCGAGGATGGCTCT | |
| | | | CCGCGTACTGGTCAGATCTTCAAGCAGA | |
| | | | CTTACTCTAAATTTGATACTAACAGCCA | |
| | | | CAATGACGATGCGCTTCTAAAAAACTAT | |
| | | | GGTCTGCTGTATTGTTTTCGTAAAGATA | |
| | | | TGGACAAAGTTGAAACCTTCCTGCGTAT | |
| | | | TGTTCAGTGTCGTTCCGTTGAGGGCAGC | |
| | | | TGTGGTTTCTAAGGTgcgccgctgggcctgcgcct | |
| | | | gcgcggcggcGGTGGTAGCGAACCGGCAAC | |
| | | | TTCCGGCTCTGAAACCCCAGGTACTTCT | |
| | | | GAAAGCGCTACTCCTGAGTCTGGCCCAG | |
| | | | GTAGCGAACCTGCTACCTCTGGCTCTGA | |
| | | | AACCCCAGGTAGCCCGGCAGGCTCTCC | |
| | | | GACTTCCACCGAGGAAGGTACCTCTACT | |
| | | | GAACCTTCTGAGGGTAGCGCTCCAGGTA | |
| | | | GCGAACCGGCAACCTCTGGCTCTGAAA | |
| | | | CCCCAGGTAGCGAACCTGCTACCTCCGG | |
| | | | CTCTGAAACTCCAGGTAGCGAACCGGCT | |
| | | | ACTTCCGGTTCTGAAACTCCAGGTACCT | |
| | | | CTACCGAACCTTCCGAAGGCAGCGCAC | |
| | | | CAGGTACTTCTGAAAGCGCAACCCCTGA | |
| | | | ATCCGGTCCAGGTAGCGAACCGGCTACT | |
| | | | TCTGGCTCTGAGACTCCAGGTACTTCTA | |
| | | | CCGAACCGTCCGAAGGTAGCGCACCA | |
| AE624- | MAEPAGSPTSTEEGT | 837 | ATGGCTGAACCTGCTGGCTCTCCAACCT | 838 |
| hGH- | PGSGTASSSPGSSTPS | | CCACTGAGGAAGGTACCCCGGGTAGCG | |
| Thrombin- | GATGSPGASPGTSST | | GTACTGCTTCTTCCTCTCCAGGTAGCTCT | |
| AE288 | GSPGSPAGSPTSTEE | | ACCCCTTCTGGTGCAACCGGCTCTCCAG | |
| | GTSESATPESGPGTS | | GTGCTTCTCCGGGCACCAGCTCTACCGG | |
| | TEPSEGSAPGSPAGS | | TTCTCCAGGTAGCCCGGCTGGCTCTCCT | |
| | PTSTEEGTSTEPSEGS | | ACCTCTACTGAGGAAGGTACTTCTGAAA | |
| | APGTSTEPSEGSAPG | | GCGCTACTCCTGAGTCTGGTCCAGGTAC | |
| | TSESATPESGPGSEP | | CTCTACTGAACCGTCCGAAGGTAGCGCT | |
| | ATSGSETPGSEPATS | | CCAGGTAGCCCAGCAGGCTCTCCGACTT | |
| | GSETPGSPAGSPTST | | CCACTGAGGAAGGTACTTCTACTGAACC | |
| | EEGTSESATPESGPG | | TTCCGAAGGCAGCGCACCAGGTACCTCT | |
| | TSTEPSEGSAPGTSTE | | ACTGAACCTTCTGAGGGCAGCGCTCCAG | |
| | PSEGSAPGSPAGSPT | | GTACTTCTGAAAGCGCTACCCCGGAATC | |
| | STEEGTSTEPSEGSAP | | TGGCCCAGGTAGCGAACCGGCTACTTCT | |
| | GTSTEPSEGSAPGTS | | GGTTCTGAAACCCCAGGTAGCGAACCG | |
| | ESATPESGPGTSTEPS | | GCTACCTCCGGTTCTGAAACTCCAGGTA | |
| | EGSAPGTSESATPES | | GCCCGGCAGGCTCTCCGACCTCTACTGA | |
| | GPGSEPATSGSETPG | | GGAAGGTACTTCTGAAAGCGCAACCCC | |
| | TSTEPSEGSAPGTSTE | | GGAGTCCGGCCCAGGTACCTCTACCGA | |
| | PSEGSAPGTSESATP | | ACCGTCTGAGGGCAGCGCACCAGGTAC | |
| | ESGPGTSESATPESG | | TTCTACCGAACCGTCCGAGGGTAGCGCA | |
| | PGSPAGSPTSTEEGT | | CCAGGTAGCCCAGCAGGTTCTCCTACCT | |
| | SESATPESGPGSEPA | | CCACCGAGGAAGGTACTTCTACCGAAC | |
| | TSGSETPGTSESATPE | | CGTCCGAGGGTAGCGCACCAGGTACCT | |
| | SGPGTSTEPSEGSAP | | CTACTGAACCTTCTGAGGGCAGCGCTCC | |
| | GTSTEPSEGSAPGTS | | AGGTACTTCTGAAAGCGCTACCCCGGA | |
| | TEPSEGSAPGTSTEPS | | GTCCGGTCCAGGTACTTCTACTGAACCG | |
| | EGSAPGTSTEPSEGS | | TCCGAAGGTAGCGCACCAGGTACTTCTG | |
| | APGTSTEPSEGSAPG | | AAAGCGCAACCCCTGAATCCGGTCCAG | |
| | SPAGSPTSTEEGTSTE | | GTAGCGAACCGGCTACTTCTGGCTCTGA | |
| | PSEGSAPGTSESATP | | GACTCCAGGTACTTCTACCGAACCGTCC | |
| | ESGPGSEPATSGSET | | GAAGGTAGCGCACCAGGTACTTCTACTG | |
| | PGTSESATPESGPGS | | AACCGTCTGAAGGTAGCGCACCAGGTA | |
| | EPATSGSETPGTSES | | CTTCTGAAAGCGCAACCCCGGAATCCG | |
| | ATPESGPGTSTEPSE | | GCCCAGGTACCTCTGAAAGCGCAACCC | |
| | GSAPGTSESATPESG | | CGGAGTCCGGCCCAGGTAGCCCTGCTG | |
| | PGSPAGSPTSTEEGSP | | GCTCTCCAACCTCCACCGAAGAAGGTAC | |
| | AGSPTSTEEGSPAGS | | CTCTGAAAGCGCAACCCCTGAATCCGGC | |
| | PTSTEEGTSESATPES | | CCAGGTAGCGAACCGGCAACCTCCGGT | |
| | GPGTSTEPSEGSAPG | | TCTGAAACCCCAGGTACCTCTGAAAGCG | |
| | FPTIPLSRLFDNAML | | CTACTCCGGAGTCTGGCCCAGGTACCTC | |
| | RAHRLHQLAFDTYQ | | TACTGAACCGTCTGAGGGTAGCGCTCCA | |
| | EFEEAYIPKEQKYSF | | GGTACTTCTACTGAACCGTCCGAAGGTA | |
| | LQNPQTSLCFSESIPT | | GCGCACCAGGTACTTCTACCGAACCGTC | |
| | PSNREETQQKSNLEL | | CGAAGGCAGCGCTCCAGGTACCTCTACT | |
| | LRISLLLIQSWLEPVQ | | GAACCTTCCGAGGGCAGCGCTCCAGGT | |
| | FLRSVFANSLVYGAS | | ACCTCTACCGAACCTTCTGAAGGTAGCG | |
| | DSNVYDLLKDLEEGI | | CACCAGGTACTTCTACCGAACCGTCCGA | |
| | QTLMGRLEDGSPRT | | GGGTAGCGCACCAGGTAGCCCAGCAGG | |
| | GQIFKQTYSKFDTNS | | TTCTCCTACCTCCACCGAGGAAGGTACT | |
| | HNDDALLKNYGLLY | | TCTACCGAACCGTCCGAGGGTAGCGCA | |
| | CFRKDMDKVETFLRI | | CCAGGTACCTCTGAAAGCGCAACTCCTG | |
| | VQCRSVEGSCGFGL | | AGTCTGGCCCAGGTAGCGAACCTGCTAC | |
| | TPRSLLVGGGGTSES | | CTCCGGCTCTGAGACTCCAGGTACCTCT | |
| | ATPESGPGSEPATSG | | GAAAGCGCAACCCCGGAATCTGGTCCA | |
| | SETPGTSESATPESGP | | GGTAGCGAACCTGCAACCTCTGGCTCTG | |
| | GSEPATSGSETPGTS | | AAACCCCAGGTACCTCTGAAAGCGCTA | |
| | ESATPESGPGTSTEPS | | CTCCTGAATCTGGCCCAGGTACTTCTAC | |
| | EGSAPGSPAGSPTST | | TGAACCGTCCGAGGGCAGCGCACCAGG | |
| | EEGTSESATPESGPG | | TACTTCTGAAAGCGCTACTCCTGAGTCC | |
| | SEPATSGSETPGTSES | | GGCCCAGGTAGCCCGGCTGGCTCTCCGA | |
| | ATPESGPGSPAGSPT | | CTTCCACCGAGGAAGGTAGCCCGGCTG | |
| | STEEGSPAGSPTSTEE | | GCTCTCCAACTTCTACTGAAGAAGGTAG | |
| | GTSTEPSEGSAPGTS | | CCCGGCAGGCTCTCCGACCTCTACTGAG | |
| | ESATPESGPGTSESA | | GAAGGTACTTCTGAAAGCGCAACCCCG | |
| | TPESGPGTSESATPES | | GAGTCCGGCCCAGGTACCTCTACCGAAC | |
| | GPGSEPATSGSETPG | | CGTCTGAGGGCAGCGCACCAGGTTTTCC | |
| | SEPATSGSETPGSPA | | GACTATTCCGCTGTCTCGTCTGTTTGAT | |
| | GSPTSTEEGTSTEPSE | | AATGCTATGCTGCGTGCGCACCGTCTGC | |
| | GSAPGTSTEPSEGSA | | ACCAGCTGGCCTTTGATACTTACCAGGA | |
| | PGSEPATSGSETPGT | | ATTTGAAGAAGCcTACATTCCTAAAGAG | |
| | SESATPESGPGTSTEP | | CAGAAGTACTCTTTCCTGCAAAACCCAC | |
| | SEGSAP | | AGACTTCTCTCTGCTTCAGCGAATCTAT | |
| | | | TCCGACGCCTTCCAATCGCGAGGAAACT | |
| | | | CAGCAAAAGTCCAATCTGGAACTACTCC | |
| | | | GCATTTCTCTGCTTCTGATTCAGAGCTG | |
| | | | GCTAGAACCAGTGCAATTTCTGCGTTCC | |
| | | | GTCTTCGCCAATAGCCTAGTTTATGGCG | |
| | | | CATCCGACAGCAACGTATACGATCTCCT | |
| | | | GAAAGATCTCGAGGAAGGCATTCAGAC | |
| | | | CCTGATGGGTCGTCTCGAGGATGGCTCT | |
| | | | CCGCGTACTGGTCAGATCTTCAAGCAGA | |
| | | | CTTACTCTAAATTTGATACTAACAGCCA | |
| | | | CAATGACGATGCGCTTCTAAAAAACTAT | |
| | | | GGTCTGCTGTATTGTTTTCGTAAAGATA | |
| | | | TGGACAAAGTTGAAACCTTCCTGCGTAT | |
| | | | TGTTCAGTGTCGTTCCGTTGAGGGCAGC | |
| | | | TGTGGTTTCTAAGGTctgaccccgcgcagcctgctg | |
| | | | gtgggcggcGGTGGTACCTCTGAAAGCGCA | |
| | | | ACTCCTGAGTCTGGCCCAGGTAGCGAAC | |
| | | | CTGCTACCTCCGGCTCTGAGACTCCAGG | |
| | | | TACCTCTGAAAGCGCAACCCCGGAATCT | |
| | | | GGTCCAGGTAGCGAACCTGCAACCTCTG | |
| | | | GCTCTGAAACCCCAGGTACCTCTGAAAG | |
| | | | CGCTACTCCTGAATCTGGCCCAGGTACT | |
| | | | TCTACTGAACCGTCCGAGGGCAGCGCA | |
| | | | CCAGGTAGCCCTGCTGGCTCTCCAACCT | |
| | | | CCACCGAAGAAGGTACCTCTGAAAGCG | |
| | | | CAACCCCTGAATCCGGCCCAGGTAGCG | |
| | | | AACCGGCAACCTCCGGTTCTGAAACCCC | |
| | | | AGGTACTTCTGAAAGCGCTACTCCTGAG | |
| | | | TCCGGCCCAGGTAGCCCGGCTGGCTCTC | |
| | | | CGACTTCCACCGAGGAAGGTAGCCCGG | |
| | | | CTGGCTCTCCAACTTCTACTGAAGAAGG | |
| | | | TACTTCTACCGAACCTTCCGAGGGCAGC | |
| | | | GCACCAGGTACTTCTGAAAGCGCTACCC | |
| | | | CTGAGTCCGGCCCAGGTACTTCTGAAAG | |
| | | | CGCTACTCCTGAATCCGGTCCAGGTACT | |
| | | | TCTGAAAGCGCTACCCCGGAATCTGGCC | |
| | | | CAGGTAGCGAACCGGCTACTTCTGGTTC | |
| | | | TGAAACCCCAGGTAGCGAACCGGCTAC | |
| | | | CTCCGGTTCTGAAACTCCAGGTAGCCCA | |
| | | | GCAGGCTCTCCGACTTCCACTGAGGAAG | |
| | | | GTACTTCTACTGAACCTTCCGAAGGCAG | |
| | | | CGCACCAGGTACCTCTACTGAACCTTCT | |
| | | | GAGGGCAGCGCTCCAGGTAGCGAACCT | |
| | | | GCAACCTCTGGCTCTGAAACCCCAGGTA | |
| | | | CCTCTGAAAGCGCTACTCCTGAATCTGG | |
| | | | CCCAGGTACTTCTACTGAACCGTCCGAG | |
| | | | GGCAGCGCACCA | |
| AE624- | MAEPAGSPTSTEEGT | 839 | ATGGCTGAACCTGCTGGCTCTCCAACCT | 840 |
| hGH- | PGSGTASSSPGSSTPS | | CCACTGAGGAAGGTACCCCGGGTAGCG | |
| FXIa- | GATGSPGASPGTSST | | GTACTGCTTCTTCCTCTCCAGGTAGCTCT | |
| AE288 | GSPGSPAGSPTSTEE | | ACCCCTTCTGGTGCAACCGGCTCTCCAG | |
| | GTSESATPESGPGTS | | GTGCTTCTCCGGGCACCAGCTCTACCGG | |
| | TEPSEGSAPGSPAGS | | TTCTCCAGGTAGCCCGGCTGGCTCTCCT | |
| | PTSTEEGTSTEPSEGS | | ACCTCTACTGAGGAAGGTACTTCTGAAA | |
| | APGTSTEPSEGSAPG | | GCGCTACTCCTGAGTCTGGTCCAGGTAC | |
| | TSESATPESGPGSEP | | CTCTACTGAACCGTCCGAAGGTAGCGCT | |
| | ATSGSETPGSEPATS | | CCAGGTAGCCCAGCAGGCTCTCCGACTT | |
| | GSETPGSPAGSPTST | | CCACTGAGGAAGGTACTTCTACTGAACC | |
| | EEGTSESATPESGPG | | TTCCGAAGGCAGCGCACCAGGTACCTCT | |
| | TSTEPSEGSAPGTSTE | | ACTGAACCTTCTGAGGGCAGCGCTCCAG | |
| | PSEGSAPGSPAGSPT | | GTACTTCTGAAAGCGCTACCCCGGAATC | |
| | STEEGTSTEPSEGSAP | | TGGCCCAGGTAGCGAACCGGCTACTTCT | |
| | GTSTEPSEGSAPGTS | | GGTTCTGAAACCCCAGGTAGCGAACCG | |
| | ESATPESGPGTSTEPS | | GCTACCTCCGGTTCTGAAACTCCAGGTA | |
| | EGSAPGTSESATPES | | GCCCGGCAGGCTCTCCGACCTCTACTGA | |
| | GPGSEPATSGSETPG | | GGAAGGTACTTCTGAAAGCGCAACCCC | |
| | TSTEPSEGSAPGTSTE | | GGAGTCCGGCCCAGGTACCTCTACCGA | |
| | PSEGSAPGTSESATP | | ACCGTCTGAGGGCAGCGCACCAGGTAC | |
| | ESGPGTSESATPESG | | TTCTACCGAACCGTCCGAGGGTAGCGCA | |
| | PGSPAGSPTSTEEGT | | CCAGGTAGCCCAGCAGGTTCTCCTACCT | |
| | SESATPESGPGSEPA | | CCACCGAGGAAGGTACTTCTACCGAAC | |
| | TSGSETPGTSESATPE | | CGTCCGAGGGTAGCGCACCAGGTACCT | |
| | SGPGTSTEPSEGSAP | | CTACTGAACCTTCTGAGGGCAGCGCTCC | |
| | GTSTEPSEGSAPGTS | | AGGTACTTCTGAAAGCGCTACCCCGGA | |
| | TEPSEGSAPGTSTEPS | | GTCCGGTCCAGGTACTTCTACTGAACCG | |
| | EGSAPGTSTEPSEGS | | TCCGAAGGTAGCGCACCAGGTACTTCTG | |
| | APGTSTEPSEGSAPG | | AAAGCGCAACCCCTGAATCCGGTCCAG | |
| | SPAGSPTSTEEGTSTE | | GTAGCGAACCGGCTACTTCTGGCTCTGA | |
| | PSEGSAPGTSESATP | | GACTCCAGGTACTTCTACCGAACCGTCC | |
| | ESGPGSEPATSGSET | | GAAGGTAGCGCACCAGGTACTTCTACTG | |
| | PGTSESATPESGPGS | | AACCGTCTGAAGGTAGCGCACCAGGTA | |
| | EPATSGSETPGTSES | | CTTCTGAAAGCGCAACCCCGGAATCCG | |
| | ATPESGPGTSTEPSE | | GCCCAGGTACCTCTGAAAGCGCAACCC | |
| | GSAPGTSESATPESG | | CGGAGTCCGGCCCAGGTAGCCCTGCTG | |
| | PGSPAGSPTSTEEGSP | | GCTCTCCAACCTCCACCGAAGAAGGTAC | |
| | AGSPTSTEEGSPAGS | | CTCTGAAAGCGCAACCCCTGAATCCGGC | |
| | PTSTEEGTSESATPES | | CCAGGTAGCGAACCGGCAACCTCCGGT | |
| | GPGTSTEPSEGSAPG | | TCTGAAACCCCAGGTACCTCTGAAAGCG | |
| | FPTIPLSRLFDNAML | | CTACTCCGGAGTCTGGCCCAGGTACCTC | |
| | RAHRLHQLAFDTYQ | | TACTGAACCGTCTGAGGGTAGCGCTCCA | |
| | EFEEAYIPKEQKYSF | | GGTACTTCTACTGAACCGTCCGAAGGTA | |
| | LQNPQTSLCFSESIPT | | GCGCACCAGGTACTTCTACCGAACCGTC | |
| | PSNREETQQKSNLEL | | CGAAGGCAGCGCTCCAGGTACCTCTACT | |
| | LRISLLLIQSWLEPVQ | | GAACCTTCCGAGGGCAGCGCTCCAGGT | |
| | FLRSVFANSLVYGAS | | ACCTCTACCGAACCTTCTGAAGGTAGCG | |
| | DSNVYDLLKDLEEGI | | CACCAGGTACTTCTACCGAACCGTCCGA | |
| | QTLMGRLEDGSPRT | | GGGTAGCGCACCAGGTAGCCCAGCAGG | |
| | GQIFKQTYSKFDTNS | | TTCTCCTACCTCCACCGAGGAAGGTACT | |
| | HNDDALLKNYGLLY | | TCTACCGAACCGTCCGAGGGTAGCGCA | |
| | CFRKDMDKVETFLRI | | CCAGGTACCTCTGAAAGCGCAACTCCTG | |
| | VQCRSVEGSCGFGG | | AGTCTGGCCCAGGTAGCGAACCTGCTAC | |
| | GKLTRVVGGGGTSE | | CTCCGGCTCTGAGACTCCAGGTACCTCT | |
| | SATPESGPGSEPATS | | GAAAGCGCAACCCCGGAATCTGGTCCA | |
| | GSETPGTSESATPES | | GGTAGCGAACCTGCAACCTCTGGCTCTG | |
| | GPGSEPATSGSETPG | | AAACCCCAGGTACCTCTGAAAGCGCTA | |
| | TSESATPESGPGTSTE | | CTCCTGAATCTGGCCCAGGTACTTCTAC | |
| | PSEGSAPGSPAGSPT | | TGAACCGTCCGAGGGCAGCGCACCAGG | |
| | STEEGTSESATPESGP | | TACTTCTGAAAGCGCTACTCCTGAGTCC | |
| | GSEPATSGSETPGTS | | GGCCCAGGTAGCCCGGCTGGCTCTCCGA | |
| | ESATPESGPGSPAGS | | CTTCCACCGAGGAAGGTAGCCCGGCTG | |
| | PTSTEEGSPAGSPTST | | GCTCTCCAACTTCTACTGAAGAAGGTAG | |
| | EEGTSTEPSEGSAPG | | CCCGGCAGGCTCTCCGACCTCTACTGAG | |
| | TSESATPESGPGTSES | | GAAGGTACTTCTGAAAGCGCAACCCCG | |
| | ATPESGPGTSESATP | | GAGTCCGGCCCAGGTACCTCTACCGAAC | |
| | ESGPGSEPATSGSET | | CGTCTGAGGGCAGCGCACCAGGTTTTCC | |
| | PGSEPATSGSETPGSP | | GACTATTCCGCTGTCTCGTCTGTTTGAT | |
| | AGSPTSTEEGTSTEPS | | AATGCTATGCTGCGTGCGCACCGTCTGC | |
| | EGSAPGTSTEPSEGS | | ACCAGCTGGCCTTTGATACTTACCAGGA | |
| | APGSEPATSGSETPG | | ATTTGAAGAAGCcTACATTCCTAAAGAG | |
| | TSESATPESGPGTSTE | | CAGAAGTACTCTTTCCTGCAAAACCCAC | |
| | PSEGSAP | | AGACTTCTCTCTGCTTCAGCGAATCTAT | |
| | | | TCCGACGCCTTCCAATCGCGAGGAAACT | |
| | | | CAGCAAAAGTCCAATCTGGAACTACTCC | |
| | | | GCATTTCTCTGCTTCTGATTCAGAGCTG | |
| | | | GCTAGAACCAGTGCAATTTCTGCGTTCC | |
| | | | GTCTTCGCCAATAGCCTAGTTTATGGCG | |
| | | | CATCCGACAGCAACGTATACGATCTCCT | |
| | | | GAAAGATCTCGAGGAAGGCATTCAGAC | |
| | | | CCTGATGGGTCGTCTCGAGGATGGCTCT | |
| | | | CCGCGTACTGGTCAGATCTTCAAGCAGA | |
| | | | CTTACTCTAAATTTGATACTAACAGCCA | |
| | | | CAATGACGATGCGCTTCTAAAAAACTAT | |
| | | | GGTCTGCTGTATTGTTTTCGTAAAGATA | |
| | | | TGGACAAAGTTGAAACCTTCCTGCGTAT | |
| | | | TGTTCAGTGTCGTTCCGTTGAGGGCAGC | |
| | | | TGTGGTTTCTAAGGTggcggcaaactgacccgcgt | |
| | | | ggtgggcggcGGTGGTACCTCTGAAAGCGCA | |
| | | | ACTCCTGAGTCTGGCCCAGGTAGCGAAC | |
| | | | CTGCTACCTCCGGCTCTGAGACTCCAGG | |
| | | | TACCTCTGAAAGCGCAACCCCGGAATCT | |
| | | | GGTCCAGGTAGCGAACCTGCAACCTCTG | |
| | | | GCTCTGAAACCCCAGGTACCTCTGAAAG | |
| | | | CGCTACTCCTGAATCTGGCCCAGGTACT | |
| | | | TCTACTGAACCGTCCGAGGGCAGCGCA | |
| | | | CCAGGTAGCCCTGCTGGCTCTCCAACCT | |
| | | | CCACCGAAGAAGGTACCTCTGAAAGCG | |
| | | | CAACCCCTGAATCCGGCCCAGGTAGCG | |
| | | | AACCGGCAACCTCCGGTTCTGAAACCCC | |
| | | | AGGTACTTCTGAAAGCGCTACTCCTGAG | |
| | | | TCCGGCCCAGGTAGCCCGGCTGGCTCTC | |
| | | | CGACTTCCACCGAGGAAGGTAGCCCGG | |
| | | | CTGGCTCTCCAACTTCTACTGAAGAAGG | |
| | | | TACTTCTACCGAACCTTCCGAGGGCAGC | |
| | | | GCACCAGGTACTTCTGAAAGCGCTACCC | |
| | | | CTGAGTCCGGCCCAGGTACTTCTGAAAG | |
| | | | CGCTACTCCTGAATCCGGTCCAGGTACT | |
| | | | TCTGAAAGCGCTACCCCGGAATCTGGCC | |
| | | | CAGGTAGCGAACCGGCTACTTCTGGTTC | |
| | | | TGAAACCCCAGGTAGCGAACCGGCTAC | |
| | | | CTCCGGTTCTGAAACTCCAGGTAGCCCA | |
| | | | GCAGGCTCTCCGACTTCCACTGAGGAAG | |
| | | | GTACTTCTACTGAACCTTCCGAAGGCAG | |
| | | | CGCACCAGGTACCTCTACTGAACCTTCT | |
| | | | GAGGGCAGCGCTCCAGGTAGCGAACCT | |
| | | | GCAACCTCTGGCTCTGAAACCCCAGGTA | |
| | | | CCTCTGAAAGCGCTACTCCTGAATCTGG | |
| | | | CCCAGGTACTTCTACTGAACCGTCCGAG | |
| | | | GGCAGCGCACCA | |
| AE624- | MAEPAGSPTSTEEGT | 841 | ATGGCTGAACCTGCTGGCTCTCCAACCT | 842 |
| hGH- | PGSGTASSSPGSSTPS | | CCACTGAGGAAGGTACCCCGGGTAGCG | |
| Elastase- | GATGSPGASPGTSST | | GTACTGCTTCTTCCTCTCCAGGTAGCTCT | |
| AE288 | GSPGSPAGSPTSTEE | | ACCCCTTCTGGTGCAACCGGCTCTCCAG | |
| | GTSESATPESGPGTS | | GTGCTTCTCCGGGCACCAGCTCTACCGG | |
| | TEPSEGSAPGSPAGS | | TTCTCCAGGTAGCCCGGCTGGCTCTCCT | |
| | PTSTEEGTSTEPSEGS | | ACCTCTACTGAGGAAGGTACTTCTGAAA | |
| | APGTSTEPSEGSAPG | | GCGCTACTCCTGAGTCTGGTCCAGGTAC | |
| | TSESATPESGPGSEP | | CTCTACTGAACCGTCCGAAGGTAGCGCT | |
| | ATSGSETPGSEPATS | | CCAGGTAGCCCAGCAGGCTCTCCGACTT | |
| | GSETPGSPAGSPTST | | CCACTGAGGAAGGTACTTCTACTGAACC | |
| | EEGTSESATPESGPG | | TTCCGAAGGCAGCGCACCAGGTACCTCT | |
| | TSTEPSEGSAPGTSTE | | ACTGAACCTTCTGAGGGCAGCGCTCCAG | |
| | PSEGSAPGSPAGSPT | | GTACTTCTGAAAGCGCTACCCCGGAATC | |
| | STEEGTSTEPSEGSAP | | TGGCCCAGGTAGCGAACCGGCTACTTCT | |
| | GTSTEPSEGSAPGTS | | GGTTCTGAAACCCCAGGTAGCGAACCG | |
| | ESATPESGPGTSTEPS | | GCTACCTCCGGTTCTGAAACTCCAGGTA | |
| | EGSAPGTSESATPES | | GCCCGGCAGGCTCTCCGACCTCTACTGA | |
| | GPGSEPATSGSETPG | | GGAAGGTACTTCTGAAAGCGCAACCCC | |
| | TSTEPSEGSAPGTSTE | | GGAGTCCGGCCCAGGTACCTCTACCGA | |
| | PSEGSAPGTSESATP | | ACCGTCTGAGGGCAGCGCACCAGGTAC | |
| | ESGPGTSESATPESG | | TTCTACCGAACCGTCCGAGGGTAGCGCA | |
| | PGSPAGSPTSTEEGT | | CCAGGTAGCCCAGCAGGTTCTCCTACCT | |
| | SESATPESGPGSEPA | | CCACCGAGGAAGGTACTTCTACCGAAC | |
| | TSGSETPGTSESATPE | | CGTCCGAGGGTAGCGCACCAGGTACCT | |
| | SGPGTSTEPSEGSAP | | CTACTGAACCTTCTGAGGGCAGCGCTCC | |
| | GTSTEPSEGSAPGTS | | AGGTACTTCTGAAAGCGCTACCCCGGA | |
| | TEPSEGSAPGTSTEPS | | GTCCGGTCCAGGTACTTCTACTGAACCG | |
| | EGSAPGTSTEPSEGS | | TCCGAAGGTAGCGCACCAGGTACTTCTG | |
| | APGTSTEPSEGSAPG | | AAAGCGCAACCCCTGAATCCGGTCCAG | |
| | SPAGSPTSTEEGTSTE | | GTAGCGAACCGGCTACTTCTGGCTCTGA | |
| | PSEGSAPGTSESATP | | GACTCCAGGTACTTCTACCGAACCGTCC | |
| | ESGPGSEPATSGSET | | GAAGGTAGCGCACCAGGTACTTCTACTG | |
| | PGTSESATPESGPGS | | AACCGTCTGAAGGTAGCGCACCAGGTA | |
| | EPATSGSETPGTSES | | CTTCTGAAAGCGCAACCCCGGAATCCG | |
| | ATPESGPGTSTEPSE | | GCCCAGGTACCTCTGAAAGCGCAACCC | |
| | GSAPGTSESATPESG | | CGGAGTCCGGCCCAGGTAGCCCTGCTG | |
| | PGSPAGSPTSTEEGSP | | GCTCTCCAACCTCCACCGAAGAAGGTAC | |
| | AGSPTSTEEGSPAGS | | CTCTGAAAGCGCAACCCCTGAATCCGGC | |
| | PTSTEEGTSESATPES | | CCAGGTAGCGAACCGGCAACCTCCGGT | |
| | GPGTSTEPSEGSAPG | | TCTGAAACCCCAGGTACCTCTGAAAGCG | |
| | FPTIPLSRLFDNAML | | CTACTCCGGAGTCTGGCCCAGGTACCTC | |
| | RAHRLHQLAFDTYQ | | TACTGAACCGTCTGAGGGTAGCGCTCCA | |
| | EFEEAYIPKEQKYSF | | GGTACTTCTACTGAACCGTCCGAAGGTA | |
| | LQNPQTSLCFSESIPT | | GCGCACCAGGTACTTCTACCGAACCGTC | |
| | PSNREETQQKSNLEL | | CGAAGGCAGCGCTCCAGGTACCTCTACT | |
| | LRISLLLIQSWLEPVQ | | GAACCTTCCGAGGGCAGCGCTCCAGGT | |
| | FLRSVFANSLVYGAS | | ACCTCTACCGAACCTTCTGAAGGTAGCG | |
| | DSNVYDLLKDLEEGI | | CACCAGGTACTTCTACCGAACCGTCCGA | |
| | QTLMGRLEDGSPRT | | GGGTAGCGCACCAGGTAGCCCAGCAGG | |
| | GQIFKQTYSKFDTNS | | TTCTCCTACCTCCACCGAGGAAGGTACT | |
| | HNDDALLKNYGLLY | | TCTACCGAACCGTCCGAGGGTAGCGCA | |
| | CFRKDMDKVETFLRI | | CCAGGTACCTCTGAAAGCGCAACTCCTG | |
| | VQCRSVEGSCGFGG | | AGTCTGGCCCAGGTAGCGAACCTGCTAC | |
| | GLGPVSGVPGGTSES | | CTCCGGCTCTGAGACTCCAGGTACCTCT | |
| | ATPESGPGSEPATSG | | GAAAGCGCAACCCCGGAATCTGGTCCA | |
| | SETPGTSESATPESGP | | GGTAGCGAACCTGCAACCTCTGGCTCTG | |
| | GSEPATSGSETPGTS | | AAACCCCAGGTACCTCTGAAAGCGCTA | |
| | ESATPESGPGTSTEPS | | CTCCTGAATCTGGCCCAGGTACTTCTAC | |
| | EGSAPGSPAGSPTST | | TGAACCGTCCGAGGGCAGCGCACCAGG | |
| | EEGTSESATPESGPG | | TACTTCTGAAAGCGCTACTCCTGAGTCC | |
| | SEPATSGSETPGTSES | | GGCCCAGGTAGCCCGGCTGGCTCTCCGA | |
| | ATPESGPGSPAGSPT | | CTTCCACCGAGGAAGGTAGCCCGGCTG | |
| | STEEGSPAGSPTSTEE | | GCTCTCCAACTTCTACTGAAGAAGGTAG | |
| | GTSTEPSEGSAPGTS | | CCCGGCAGGCTCTCCGACCTCTACTGAG | |
| | ESATPESGPGTSESA | | GAAGGTACTTCTGAAAGCGCAACCCCG | |
| | TPESGPGTSESATPES | | GAGTCCGGCCCAGGTACCTCTACCGAAC | |
| | GPGSEPATSGSETPG | | CGTCTGAGGGCAGCGCACCAGGTTTTCC | |
| | SEPATSGSETPGSPA | | GACTATTCCGCTGTCTCGTCTGTTTGAT | |
| | GSPTSTEEGTSTEPSE | | AATGCTATGCTGCGTGCGCACCGTCTGC | |
| | GSAPGTSTEPSEGSA | | ACCAGCTGGCCTTTGATACTTACCAGGA | |
| | PGSEPATSGSETPGT | | ATTTGAAGAAGCcTACATTCCTAAAGAG | |
| | SESATPESGPGTSTEP | | CAGAAGTACTCTTTCCTGCAAAACCCAC | |
| | SEGSAP | | AGACTTCTCTCTGCTTCAGCGAATCTAT | |
| | | | TCCGACGCCTTCCAATCGCGAGGAAACT | |
| | | | CAGCAAAAGTCCAATCTGGAACTACTCC | |
| | | | GCATTTCTCTGCTTCTGATTCAGAGCTG | |
| | | | GCTAGAACCAGTGCAATTTCTGCGTTCC | |
| | | | GTCTTCGCCAATAGCCTAGTTTATGGCG | |
| | | | CATCCGACAGCAACGTATACGATCTCCT | |
| | | | GAAAGATCTCGAGGAAGGCATTCAGAC | |
| | | | CCTGATGGGTCGTCTCGAGGATGGCTCT | |
| | | | CCGCGTACTGGTCAGATCTTCAAGCAGA | |
| | | | CTTACTCTAAATTTGATACTAACAGCCA | |
| | | | CAATGACGATGCGCTTCTAAAAAACTAT | |
| | | | GGTCTGCTGTATTGTTTTCGTAAAGATA | |
| | | | TGGACAAAGTTGAAACCTTCCTGCGTAT | |
| | | | TGTTCAGTGTCGTTCCGTTGAGGGCAGC | |
| | | | TGTGGTTTCTAAGGTggcggcctgggcccggtgag | |
| | | | cggcgtgccgGGTGGTACCTCTGAAAGCGCA | |
| | | | ACTCCTGAGTCTGGCCCAGGTAGCGAAC | |
| | | | CTGCTACCTCCGGCTCTGAGACTCCAGG | |
| | | | TACCTCTGAAAGCGCAACCCCGGAATCT | |
| | | | GGTCCAGGTAGCGAACCTGCAACCTCTG | |
| | | | GCTCTGAAACCCCAGGTACCTCTGAAAG | |
| | | | CGCTACTCCTGAATCTGGCCCAGGTACT | |
| | | | TCTACTGAACCGTCCGAGGGCAGCGCA | |
| | | | CCAGGTAGCCCTGCTGGCTCTCCAACCT | |
| | | | CCACCGAAGAAGGTACCTCTGAAAGCG | |
| | | | CAACCCCTGAATCCGGCCCAGGTAGCG | |
| | | | AACCGGCAACCTCCGGTTCTGAAACCCC | |
| | | | AGGTACTTCTGAAAGCGCTACTCCTGAG | |
| | | | TCCGGCCCAGGTAGCCCGGCTGGCTCTC | |
| | | | CGACTTCCACCGAGGAAGGTAGCCCGG | |
| | | | CTGGCTCTCCAACTTCTACTGAAGAAGG | |
| | | | TACTTCTACCGAACCTTCCGAGGGCAGC | |
| | | | GCACCAGGTACTTCTGAAAGCGCTACCC | |
| | | | CTGAGTCCGGCCCAGGTACTTCTGAAAG | |
| | | | CGCTACTCCTGAATCCGGTCCAGGTACT | |
| | | | TCTGAAAGCGCTACCCCGGAATCTGGCC | |
| | | | CAGGTAGCGAACCGGCTACTTCTGGTTC | |
| | | | TGAAACCCCAGGTAGCGAACCGGCTAC | |
| | | | CTCCGGTTCTGAAACTCCAGGTAGCCCA | |
| | | | GCAGGCTCTCCGACTTCCACTGAGGAAG | |
| | | | GTACTTCTACTGAACCTTCCGAAGGCAG | |
| | | | CGCACCAGGTACCTCTACTGAACCTTCT | |
| | | | GAGGGCAGCGCTCCAGGTAGCGAACCT | |
| | | | GCAACCTCTGGCTCTGAAACCCCAGGTA | |
| | | | CCTCTGAAAGCGCTACTCCTGAATCTGG | |
| | | | CCCAGGTACTTCTACTGAACCGTCCGAG | |
| | | | GGCAGCGCACCA | |
| AE624- | MAEPAGSPTSTEEGT | 843 | ATGGCTGAACCTGCTGGCTCTCCAACCT | 844 |
| hGH- | PGSGTASSSPGSSTPS | | CCACTGAGGAAGGTACCCCGGGTAGCG | |
| MMP-17- | GATGSPGASPGTSST | | GTACTGCTTCTTCCTCTCCAGGTAGCTCT | |
| AE288 | GSPGSPAGSPTSTEE | | ACCCCTTCTGGTGCAACCGGCTCTCCAG | |
| | GTSESATPESGPGTS | | GTGCTTCTCCGGGCACCAGCTCTACCGG | |
| | TEPSEGSAPGSPAGS | | TTCTCCAGGTAGCCCGGCTGGCTCTCCT | |
| | PTSTEEGTSTEPSEGS | | ACCTCTACTGAGGAAGGTACTTCTGAAA | |
| | APGTSTEPSEGSAPG | | GCGCTACTCCTGAGTCTGGTCCAGGTAC | |
| | TSESATPESGPGSEP | | CTCTACTGAACCGTCCGAAGGTAGCGCT | |
| | ATSGSETPGSEPATS | | CCAGGTAGCCCAGCAGGCTCTCCGACTT | |
| | GSETPGSPAGSPTST | | CCACTGAGGAAGGTACTTCTACTGAACC | |
| | EEGTSESATPESGPG | | TTCCGAAGGCAGCGCACCAGGTACCTCT | |
| | TSTEPSEGSAPGTSTE | | ACTGAACCTTCTGAGGGCAGCGCTCCAG | |
| | PSEGSAPGSPAGSPT | | GTACTTCTGAAAGCGCTACCCCGGAATC | |
| | STEEGTSTEPSEGSAP | | TGGCCCAGGTAGCGAACCGGCTACTTCT | |
| | GTSTEPSEGSAPGTS | | GGTTCTGAAACCCCAGGTAGCGAACCG | |
| | ESATPESGPGTSTEPS | | GCTACCTCCGGTTCTGAAACTCCAGGTA | |
| | EGSAPGTSESATPES | | GCCCGGCAGGCTCTCCGACCTCTACTGA | |
| | GPGSEPATSGSETPG | | GGAAGGTACTTCTGAAAGCGCAACCCC | |
| | TSTEPSEGSAPGTSTE | | GGAGTCCGGCCCAGGTACCTCTACCGA | |
| | PSEGSAPGTSESATP | | ACCGTCTGAGGGCAGCGCACCAGGTAC | |
| | ESGPGTSESATPESG | | TTCTACCGAACCGTCCGAGGGTAGCGCA | |
| | PGSPAGSPTSTEEGT | | CCAGGTAGCCCAGCAGGTTCTCCTACCT | |
| | SESATPESGPGSEPA | | CCACCGAGGAAGGTACTTCTACCGAAC | |
| | TSGSETPGTSESATPE | | CGTCCGAGGGTAGCGCACCAGGTACCT | |
| | SGPGTSTEPSEGSAP | | CTACTGAACCTTCTGAGGGCAGCGCTCC | |
| | GTSTEPSEGSAPGTS | | AGGTACTTCTGAAAGCGCTACCCCGGA | |
| | TEPSEGSAPGTSTEPS | | GTCCGGTCCAGGTACTTCTACTGAACCG | |
| | EGSAPGTSTEPSEGS | | TCCGAAGGTAGCGCACCAGGTACTTCTG | |
| | APGTSTEPSEGSAPG | | AAAGCGCAACCCCTGAATCCGGTCCAG | |
| | SPAGSPTSTEEGTSTE | | GTAGCGAACCGGCTACTTCTGGCTCTGA | |
| | PSEGSAPGTSESATP | | GACTCCAGGTACTTCTACCGAACCGTCC | |
| | ESGPGSEPATSGSET | | GAAGGTAGCGCACCAGGTACTTCTACTG | |
| | PGTSESATPESGPGS | | AACCGTCTGAAGGTAGCGCACCAGGTA | |
| | EPATSGSETPGTSES | | CTTCTGAAAGCGCAACCCCGGAATCCG | |
| | ATPESGPGTSTEPSE | | GCCCAGGTACCTCTGAAAGCGCAACCC | |
| | GSAPGTSESATPESG | | CGGAGTCCGGCCCAGGTAGCCCTGCTG | |
| | PGSPAGSPTSTEEGSP | | GCTCTCCAACCTCCACCGAAGAAGGTAC | |
| | AGSPTSTEEGSPAGS | | CTCTGAAAGCGCAACCCCTGAATCCGGC | |
| | PTSTEEGTSESATPES | | CCAGGTAGCGAACCGGCAACCTCCGGT | |
| | GPGTSTEPSEGSAPG | | TCTGAAACCCCAGGTACCTCTGAAAGCG | |
| | FPTIPLSRLFDNAML | | CTACTCCGGAGTCTGGCCCAGGTACCTC | |
| | RAHRLHQLAFDTYQ | | TACTGAACCGTCTGAGGGTAGCGCTCCA | |
| | EFEEAYIPKEQKYSF | | GGTACTTCTACTGAACCGTCCGAAGGTA | |
| | LQNPQTSLCFSESIPT | | GCGCACCAGGTACTTCTACCGAACCGTC | |
| | PSNREETQQKSNLEL | | CGAAGGCAGCGCTCCAGGTACCTCTACT | |
| | LRISLLLIQSWLEPVQ | | GAACCTTCCGAGGGCAGCGCTCCAGGT | |
| | FLRSVFANSLVYGAS | | ACCTCTACCGAACCTTCTGAAGGTAGCG | |
| | DSNVYDLLKDLEEGI | | CACCAGGTACTTCTACCGAACCGTCCGA | |
| | QTLMGRLEDGSPRT | | GGGTAGCGCACCAGGTAGCCCAGCAGG | |
| | GQIFKQTYSKFDTNS | | TTCTCCTACCTCCACCGAGGAAGGTACT | |
| | HNDDALLKNYGLLY | | TCTACCGAACCGTCCGAGGGTAGCGCA | |
| | CFRKDMDKVETFLRI | | CCAGGTACCTCTGAAAGCGCAACTCCTG | |
| | VQCRSVEGSCGFGA | | AGTCTGGCCCAGGTAGCGAACCTGCTAC | |
| | PLGLRLRGGGGTSES | | CTCCGGCTCTGAGACTCCAGGTACCTCT | |
| | ATPESGPGSEPATSG | | GAAAGCGCAACCCCGGAATCTGGTCCA | |
| | SETPGTSESATPESGP | | GGTAGCGAACCTGCAACCTCTGGCTCTG | |
| | GSEPATSGSETPGTS | | AAACCCCAGGTACCTCTGAAAGCGCTA | |
| | ESATPESGPGTSTEPS | | CTCCTGAATCTGGCCCAGGTACTTCTAC | |
| | EGSAPGSPAGSPTST | | TGAACCGTCCGAGGGCAGCGCACCAGG | |
| | EEGTSESATPESGPG | | TACTTCTGAAAGCGCTACTCCTGAGTCC | |
| | SEPATSGSETPGTSES | | GGCCCAGGTAGCCCGGCTGGCTCTCCGA | |
| | ATPESGPGSPAGSPT | | CTTCCACCGAGGAAGGTAGCCCGGCTG | |
| | STEEGSPAGSPTSTEE | | GCTCTCCAACTTCTACTGAAGAAGGTAG | |
| | GTSTEPSEGSAPGTS | | CCCGGCAGGCTCTCCGACCTCTACTGAG | |
| | ESATPESGPGTSESA | | GAAGGTACTTCTGAAAGCGCAACCCCG | |
| | TPESGPGTSESATPES | | GAGTCCGGCCCAGGTACCTCTACCGAAC | |
| | GPGSEPATSGSETPG | | CGTCTGAGGGCAGCGCACCAGGTTTTCC | |
| | SEPATSGSETPGSPA | | GACTATTCCGCTGTCTCGTCTGTTTGAT | |
| | GSPTSTEEGTSTEPSE | | AATGCTATGCTGCGTGCGCACCGTCTGC | |
| | GSAPGTSTEPSEGSA | | ACCAGCTGGCCTTTGATACTTACCAGGA | |
| | PGSEPATSGSETPGT | | ATTTGAAGAAGCcTACATTCCTAAAGAG | |
| | SESATPESGPGTSTEP | | CAGAAGTACTCTTTCCTGCAAAACCCAC | |
| | SEGSAP | | AGACTTCTCTCTGCTTCAGCGAATCTAT | |
| | | | TCCGACGCCTTCCAATCGCGAGGAAACT | |
| | | | CAGCAAAAGTCCAATCTGGAACTACTCC | |
| | | | GCATTTCTCTGCTTCTGATTCAGAGCTG | |
| | | | GCTAGAACCAGTGCAATTTCTGCGTTCC | |
| | | | GTCTTCGCCAATAGCCTAGTTTATGGCG | |
| | | | CATCCGACAGCAACGTATACGATCTCCT | |
| | | | GAAAGATCTCGAGGAAGGCATTCAGAC | |
| | | | CCTGATGGGTCGTCTCGAGGATGGCTCT | |
| | | | CCGCGTACTGGTCAGATCTTCAAGCAGA | |
| | | | CTTACTCTAAATTTGATACTAACAGCCA | |
| | | | CAATGACGATGCGCTTCTAAAAAACTAT | |
| | | | GGTCTGCTGTATTGTTTTCGTAAAGATA | |
| | | | TGGACAAAGTTGAAACCTTCCTGCGTAT | |
| | | | TGTTCAGTGTCGTTCCGTTGAGGGCAGC | |
| | | | TGTGGTTTCTAAGGTgcgccgctgggcctgcgcct | |
| | | | gcgcggcggcGGTGGTACCTCTGAAAGCGC | |
| | | | AACTCCTGAGTCTGGCCCAGGTAGCGA | |
| | | | ACCTGCTACCTCCGGCTCTGAGACTCCA | |
| | | | GGTACCTCTGAAAGCGCAACCCCGGAA | |
| | | | TCTGGTCCAGGTAGCGAACCTGCAACCT | |
| | | | CTGGCTCTGAAACCCCAGGTACCTCTGA | |
| | | | AAGCGCTACTCCTGAATCTGGCCCAGGT | |
| | | | ACTTCTACTGAACCGTCCGAGGGCAGCG | |
| | | | CACCAGGTAGCCCTGCTGGCTCTCCAAC | |
| | | | CTCCACCGAAGAAGGTACCTCTGAAAG | |
| | | | CGCAACCCCTGAATCCGGCCCAGGTAG | |
| | | | CGAACCGGCAACCTCCGGTTCTGAAACC | |
| | | | CCAGGTACTTCTGAAAGCGCTACTCCTG | |
| | | | AGTCCGGCCCAGGTAGCCCGGCTGGCTC | |
| | | | TCCGACTTCCACCGAGGAAGGTAGCCC | |
| | | | GGCTGGCTCTCCAACTTCTACTGAAGAA | |
| | | | GGTACTTCTACCGAACCTTCCGAGGGCA | |
| | | | GCGCACCAGGTACTTCTGAAAGCGCTAC | |
| | | | CCCTGAGTCCGGCCCAGGTACTTCTGAA | |
| | | | AGCGCTACTCCTGAATCCGGTCCAGGTA | |
| | | | CTTCTGAAAGCGCTACCCCGGAATCTGG | |
| | | | CCCAGGTAGCGAACCGGCTACTTCTGGT | |
| | | | TCTGAAACCCCAGGTAGCGAACCGGCT | |
| | | | ACCTCCGGTTCTGAAACTCCAGGTAGCC | |
| | | | CAGCAGGCTCTCCGACTTCCACTGAGGA | |
| | | | AGGTACTTCTACTGAACCTTCCGAAGGC | |
| | | | AGCGCACCAGGTACCTCTACTGAACCTT | |
| | | | CTGAGGGCAGCGCTCCAGGTAGCGAAC | |
| | | | CTGCAACCTCTGGCTCTGAAACCCCAGG | |
| | | | TACCTCTGAAAGCGCTACTCCTGAATCT | |
| | | | GGCCCAGGTACTTCTACTGAACCGTCCG | |
| | | | AGGGCAGCGCACCA | |

*Sequence name reflects N- to C-terminus configuration of the growth factor, cleavage sequence and XTEN components

The application's sequence listing, which the Patent Office published only in electronic form, follows.

SEQUENCE LISTING (850 sequences)

SEQ ID NO: 1 - protein, 191 aa, Homo sapiens [sequence omitted]

SEQ ID NO: 2 - protein, 190 aa, Sus sp.
FPAMPLSSLFANAVLRAQHLHQLAADTYKEFERAYIPEGQRYSIQNAQAAFCFSETIPAPTGKDEAQQRSDVELLRFSLLLIQSWLGPVQFLSRVFTNSLVFGTSDRVYEKLKDLEEGIQALMRELEDGSPRAGQILKQTYDKFDTNLRSDDALLKNYGLLSCFKKDLHKAETYLRVMKCRRFVESSCAF

SEQ ID NO: 3 - protein, 190 aa, Vicugna pacos
FPAMPLSSLFANAVLRAQHLHQLAADTYKEFERTYIPEGQRYSIQNAQAAFCFSETIPAPTGKDEAQQRSDVELLRFSLLLIQSWLGPVQFLSRVFTNSLVFGTSDRVYEKLKDLEEGIQALMRELEDGSPRAGQILRQTYDKFDTNLRSDDALLKNYGLLSCFKKDLHKAETYLRVMKCRRFVESSCAF

SEQ ID NO: 4 - protein, 190 aa, Camelus sp.; identical to SEQ ID NO: 3

SEQ ID NO: 5 - protein, 190 aa, Equus ferus
FPAMPLSSLFANAVLRAQHLHQLAADTYKEFERAYIPEGQRYSIQNAQAAFCFSETIPAPTGKDEAQQRSDMELLRFSLLLIQSWLGPVQLLSRVFTNSLVFGTSDRVYEKLRDLEEGIQALMRELEDGSPRAGQILKQTYDKFDTNLRSDDALLKNYGLLSCFKKDLHKAETYLRVMKCRRFVESSCAF

SEQ ID NO: 6 - protein, 190 aa, Unknown
  Description of Unknown: Elephant growth hormone protein
FPAMPLSSLFANAVLRAQHLHQLAADTYKEFERAYIPEGQRYSIQNAQAAFCFSETIPAPTGKDEAQQRSDVELLRFSLLLIQSWLGPVQFLSRVFTNSLVFGTSDRVYEKLKDLEEGIQALMRELEDGSPRPGQVLKQTYDKFDTNMRSDDALLKNYGLLSCFKKDLHKAETYLRVMKCRRFVESSCAF

SEQ ID NO: 7 - protein, 190 aa, Vulpes vulpes
FPAMPLSSLFANAVLRAQHLHQLAADTYKEFERAYIPEGQRYSIQNAQAAFCFSETIPAPTGKDEAQQRSDVELLRFSLVLIQSWLGPLQFLSRVFTNSLVFGTSDRVYEKLKDLEEGIQALMRELEDGSPRAGQILKQTYDKFDTNLRSDDALLKNYGLLSCFKKDLHKAETYLRVMKCRRFVESSCAF

SEQ ID NO: 8 - protein, 190 aa, Canis familiaris; identical to SEQ ID NO: 2

SEQ ID NO: 9 - protein, 190 aa, Felis catus
FPAMPLSSLFANAVLRAQHLHQLAADTYKEFERAYIPEGQRYSIQNAQAAFCFSETIPAPTGKDEAQQRSDVELLRFSLLLIQSWLGPVQFLSRVFTNSLVFGTSDRVYEKLKDLEEGIQALMRELEDGSPRGGQILKQTYDKFDTNLRSDDALLKNYGLLSCFKKDLHKAETYLRVMKCRRFVESSCAF

SEQ ID NO: 10 - protein, 190 aa, Neovison vison
FPAMPLSSLFANAVLRAQHLHQLAADTYKDFERAYIPEGQRYSIQNAQAAFCFSETIPAPTGKDEAQQRSDMELLRFSLLLIQSWLGPVQFLSRVFTNSLVFGTSDRVYEKLKDLEEGIQALMRELEDGSPRAGPILKQTYDKFDTNLRSDDALLKNYGLLSCFKKDLHKAETYLRVMKCRRFVESSCAF

SEQ ID NO: 11 - protein, 190 aa, Balaenoptera physalus
FPAMPLSSLFANAVLRAQHLHQLAADTYKEFERAYIPEGQRYSIQNAQAAFCFSETIPAPTGKDEAQQRSDVELLRFSLLLIQSWLGPVQFLSRVFTNSLVFGTSDRVYEKLKDLEEGIQALMRELEDGSPRAGQILKQTYDKFDTNMRSDDALLKNYGLLSCFKKDLHKAETYLRVMKCRRFVESSCAF

SEQ ID NO: 12 - protein, 190 aa, Unknown
  Description of Unknown: Dolphin growth hormone protein
FPAMPLSSLFANAVLRAQHLHQLAADTYKEFERAYIPEGQRYSIQNTQAAFCFSETIPAPTGKDEAQQRSDVELLRFSLLLIQSWLGPVQFLSRVFTNSLVFGTSDRVYEKLKDLEEGIQALMRELEDGSPRAGQILKQTYDKFDTNMRSDDALLKNYGLLSCFKKDLHKAETYLRVMKCRRFVESSCAF

SEQ ID NO: 13 - protein, 190 aa, Hippopotamus amphibius; identical to SEQ ID NO: 12

SEQ ID NO: 14 - protein, 190 aa, Unknown
  Description of Unknown: Rabbit growth hormone protein
FPAMPLSSLFANAVLRAQHLHQLAADTYKEFERAYIPEGQRYSIQNAQAAFCFSETIPAPTGKDEAQQRSDMELLRFSLLLIQSWLGPVQFLSRAFTNTLVFGTSDRVYEKLKDLEEGIQALMRELEDGSPRVGQLLKQTYDKFDTNLRGDDALLKNYGLLSCFKKDLHKAETYLRVMKCRRFVESSCVF

SEQ ID NO: 15 - protein, 190 aa, Rattus sp.
FPAMPLSSLFANAVLRAQHLHQLAADTYKEFERAYIPEGQRYSIQNAQAAFCFSETIPAPTGKEEAQQRTDMELLRFSLLLIQSWLGPVQFLSRIFTNSLMFGTSDRVYEKLKDLEEGIQALMQELEDGSPRIGQILKQTYDKFDANMRSDDALLKNYGLLSCFKKDLHKAETYLRVMKCRRFAESSCAF

SEQ ID NO: 16 - protein, 190 aa, Mus sp.
FPAMPLSSLFSNAVLRAQHLHQLAADTYKEFERAYIPEGQRYSIQNAQAAFCFSETIPAPTGKEEAQQRTDMELLRFSLLLIQSWLGPVQFLSRIFTNSLMFGTSDRVYEKLKDLEEGIQALMQELEDGSPRVGQILKQTYDKFDANMRSDDALLKNYGLLSCFKKDLHKAETYLRVMKCRRFVESSCAF

SEQ ID NO: 17 - protein, 190 aa, Unknown
  Description of Unknown: Hamster growth hormone protein
FPAMPLSSLFANAVLRAQHLHQLAADTYKEFERAYIPEGQRYSIQNAQTAFCFSETIPAPTGKEEAQQRSDMELLRFSLLLIQSWLGPVQFLSRIFTNSLMFGTSDRVYEKLKDLEEGIQALMQELEDGSPRVGQILKQTYDKFDTNMRSDDALLKNYGLLSCFKKDLHKAETYLRVMKCRRFVESSCAF

SEQ ID NO: 18 - protein, 190 aa, Unknown
  Description of Unknown: Mole rat growth hormone protein
FPAMPLSNLFANAVLRAQHLHQLAADTYKEFERAYIPEGQRYSIQNAQAAFCFSETIPAPTGKEEAQQRSDMELLRFSLLLIQSWLGPVQFLSRVFTNSLVFGTSDRVFEKLKDLEEGIQALMRELEDGSLRAGQLLKQTYDKFDTNMRSDDALLKNYGLLSCFKKDLHKAETYLRVMKCRRFVESSCAF

SEQ ID NO: 19 - protein, 190 aa, Cavia porcellus
FPAMPLSSLFGNAVLRAQHLHQLAADTYKEFERTYIPEGQRYSIHNTQTAFCFSETIPAPTDKEEAQQRSDVELLHFSLLLIQSWLGPVQFLSRVFTNSLVFGTSDRVYEKLKDLEEGIQALMRELEDGTPRAGQILKQTYDKFDTNLRSNDALLKNYGLLSCFRKDLHRTETYLRVMKCRRFVESSCAF

SEQ ID NO: 20 - protein, 191 aa, Unknown
  Description of Unknown: Ox growth hormone protein
AFPAMSLSGLFANAVLRAQHLHQLAADTFKEFERTYIPEGQRYSIQNTQVAFCFSETIPAPTGKNEAQQKSDLELLRISLLLIQSWLGPLQFLSRVFTNSLVFGTSDRVYEKLKDLEEGILALMRELEDGTPRAGQILKQTYDKFDTNMRSDDALLKNYGLLSCFRKDLHKTETYLRVMKCRRFGEASCAF

SEQ ID NO: 21 - protein, 191 aa, Unknown
  Description of Unknown: Sheep or Goat growth hormone protein
AFPAMSLSGLFANAVLRAQHLHQLAADTFKEFERTYIPEGQRYSIQNTQVAFCFSETIPAPTGKNEAQQKSDLELLRISLLLIQSWLGPLQFLSRVFTNSLVFGTSDRVYEKLKDLEEGILALMRELEDVTPRAGQILKQTYDKFDTNMRSDDALLKNYGLLSCFRKDLHKTETYLRVMKCRRFGEASCAF

SEQ ID NO: 22 - protein, 190 aa, Cervus elaphus
FPAMSLSGLFANAVLRAQHLHQLAADTFKEFERTYIPEGQRYSIQNTQVAFCFSETIPAPTGKNEAQQKSDLELLRISLLLIQSWLGPLQFLSRVFTNSLVFGTSDRVYEKLKDLEEGILALMRELEDGTPRAGQILKQTYDKFDTNMRSDDALLKNYGLLSCFRKDLHKTETYLRVMKCRRFGEASCAF

SEQ ID NO: 23 - protein, 191 aa, Giraffa camelopardalis
AFPAMSLSGLFANAVLRAQHLHQLAADTFKEFERTYIPEGQRYSIQNTQVAFCFSETIPAPTGKNEAQQKSDLELLRISLLLIQSWLGPLQFLSRVFSNSLVFGTSDRVYEKLKDLEEGILALMRELEDGTPRAGQILKQTYDKFDTNMRSDDALLKNYGLLSCFRKDLHKTETYLRVMKCRRFGEASCAF

SEQ ID NO: 24 - protein, 190 aa, Unknown
  Description of Unknown: Chevrotain-1 growth hormone protein
FPAMSLSGLFANAVLRVQHLHQLAADTFKEFERTYIPEGQRYSIQNTQVAFCFSETIPAPTGKNEAQQKSDLELLRISLLLIQSWLGPLQFLSRVFTNSLVFGTSDRVYEKLKDLEEGILALMRELEDGPPRAGQILKQTYDKFDTNMRSDDALLKNYGLLSCFRKDLHKTETYLRVMKCRRFGEASCAF

SEQ ID NO: 25 - protein, 190 aa, Unknown
  Description of Unknown: Slow loris growth hormone protein
FPAMPLSSLFANAVLRAQHLHQLAADTYKEFERAYIPEGQRYSIQNAQAAFCFSETIPAPTGKDEAQQRSDMELLRFSLLLIQSWLGPVQLLSRVFTNSLVLGTSDRVYEKLKDLEEGIQALMRELEDGSPRVGQILKQTYDKFDTNLRSDDALLKNYGLLSCFKKDLHKAETYLRVMKCRRFVESSCAF

SEQ ID NO: 26 - protein, 191 aa, Unknown
  Description of Unknown: Marmoset growth hormone protein
FPTIPLSRLLDNAMLRAHRLHQLAFDTYQEFEEAYIPKEQKYSFLQNPQTSLCFSESIPTPASKKETQQKSNLELLRMSLLLIQSWFEPVQFLRSVFANSLLYGVSDSDVYEYLKDLEEGIQTLMGRLEDGSPRTGEIFMQTYRKFDVNSQNNDALLKNYGLLYCFRKDMDKVETFLRIVQCRSVEGSCGF

SEQ ID NO: 27 - protein, 190 aa, Unknown
  Description of Unknown: BrTailed Possum growth hormone protein
FPAMPLSSLFANAVLRAQHLHQLVADTYKEFERTYIPEAQRHSIQSTQTAFCFSETIPAPTGKDEAQQRSDVELLRFSLLLIQSWLSPVQFLSRVFTNSLVFGTSDRVYEKLRDLEEGIQALMQELEDGSSRGGLVLKTTYDKFDTNLRSDEALLKNYGLLSCFKKDLHKAETYLRVMKCRRFVESSCAF

SEQ ID NO: 28 - protein, 191 aa, Macaca mulatta
FPTIPLSRLFDNAMLRAHRLHQLAFDTYQEFEEAYIPKEQKYSFLQNPQTSLCFSESIPTPSNREETQQKSNLELLRISLLLIQSWLEPVQFLRSVFANSLVYGTSYSDVYDLLKDLEEGIQTLMGRLEDGSSRTGQIFKQTYSKFDTNSHNNDALLKNYGLLYCFRKDMDKIETFLRIVQCRSVEGSCGF

SEQ ID NO: 29 - protein, 12 aa, Artificial Sequence
  Description of Artificial Sequence: Synthetic peptide
GESPGGSSGSES

SEQ ID NO: 30 - protein, 12 aa, Artificial Sequence
  Description of Artificial Sequence: Synthetic peptide
GSEGSSGPGESS

SEQ ID NO: 31 - protein, 12 aa, Artificial Sequence
  Description of Artificial Sequence: Synthetic peptide
GSSESGSSEGGP

SEQ ID NO: 32 - protein, 12 aa, Artificial Sequence
  Description of Artificial Sequence: Synthetic peptide
GSGGEPSESGSS

SEQ ID NO: 33 - protein, 12 aa, Artificial Sequence
  Description of Artificial Sequence: Synthetic peptide
GSPAGSPTSTEE

SEQ ID NO: 34 - protein, 12 aa, Artificial Sequence
  Description of Artificial Sequence: Synthetic peptide
GSEPATSGSETP

SEQ ID NO: 35 - protein, 12 aa, Artificial Sequence
  Description of Artificial Sequence: Synthetic peptide
GTSESATPESGP

SEQ ID NO: 36 - protein, 12 aa, Artificial Sequence
  Description of Artificial Sequence: Synthetic peptide
GTSTEPSEGSAP

SEQ ID NO: 37 - protein, 12 aa, Artificial Sequence
  Description of Artificial Sequence: Synthetic peptide
GSTSESPSGTAP

SEQ ID NO: 38 - protein, 12 aa, Artificial Sequence
  Description of Artificial Sequence: Synthetic peptide
GTSTPESGSASP

SEQ ID NO: 39 - protein, 12 aa, Artificial Sequence
  Description of Artificial Sequence: Synthetic peptide
GTSPSGESSTAP

SEQ ID NO: 40 - protein, 12 aa, Artificial Sequence
  Description of Artificial Sequence: Synthetic peptide
GSTSSTAESPGP

SEQ ID NO: 41 - protein, 12 aa, Artificial Sequence
  Description of Artificial Sequence: Synthetic peptide
GTPGSGTASSSP

SEQ ID NO: 42 - protein, 12 aa, Artificial Sequence
  Description of Artificial Sequence: Synthetic peptide
GSSTPSGATGSP

SEQ ID NO: 43 - protein, 12 aa, Artificial Sequence
  Description of Artificial Sequence: Synthetic peptide
GSSPSASTGTGP

SEQ ID NO: 44 - protein, 12 aa, Artificial Sequence
  Description of Artificial Sequence: Synthetic peptide
GASPGTSSTGSP

SEQ ID NO: 45 - protein, 12 aa, Artificial Sequence
  Description of Artificial Sequence: Synthetic peptide
GEPAGSPTSTSE

SEQ ID NO: 46 - protein, 12 aa, Artificial Sequence
  Description of Artificial Sequence: Synthetic peptide
GTGEPSSTPASE

SEQ ID NO: 47 - protein, 12 aa, Artificial Sequence
  Description of Artificial Sequence: Synthetic peptide
GSGPSTESAPTE

SEQ ID NO: 48 - protein, 12 aa, Artificial Sequence
  Description of Artificial Sequence: Synthetic peptide
GSETPSGPSETA

SEQ ID NO: 49 - protein, 12 aa, Artificial Sequence
  Description of Artificial Sequence: Synthetic peptide
GPSETSTSEPGA

SEQ ID NO: 50 - protein, 12 aa, Artificial Sequence
  Description of Artificial Sequence: Synthetic peptide
GSPSEPTEGTSA

SEQ ID NO: 51 - protein, 12 aa, Artificial Sequence
  Description of Artificial Sequence: Synthetic peptide
GSGASEPTSTEP

SEQ ID NO: 52 - protein, 12 aa, Artificial Sequence
  Description of Artificial Sequence: Synthetic peptide
GSEPATSGTEPS

SEQ ID NO: 53 - protein, 12 aa, Artificial Sequence
  Description of Artificial Sequence: Synthetic peptide
GTSEPSTSEPGA

SEQ ID NO: 54 - protein, 12 aa, Artificial Sequence
  Description of Artificial Sequence: Synthetic peptide
GTSTEPSEPGSA

SEQ ID NO: 55 - protein, 12 aa, Artificial Sequence
  Description of Artificial Sequence: Synthetic peptide
GSTAGSETSTEA

SEQ ID NO: 56 - protein, 12 aa, Artificial Sequence
  Description of Artificial Sequence: Synthetic peptide
GSETATSGSETA

SEQ ID NO: 57 - protein, 12 aa, Artificial Sequence
  Description of Artificial Sequence: Synthetic peptide
GTSESATSESGA

SEQ ID NO: 58 - protein, 12 aa, Artificial Sequence
  Description of Artificial Sequence: Synthetic peptide
GTSTEASEGSAS

SEQ ID NO: 59 - protein, 48 aa, Artificial Sequence
  Description of Artificial Sequence: Synthetic polypeptide
MAEPAGSPTSTEEGTPGSGTASSSPGSSTPSGATGSPGASPGTSSTGS

SEQ ID NO: 60 - protein, 48 aa, Artificial Sequence
  Description of Artificial Sequence: Synthetic polypeptide
MAEPAGSPTSTEEGASPGTSSTGSPGSSTPSGATGSPGSSTPSGATGS

SEQ ID NO: 61 - protein, 144 aa, Artificial Sequence
  Description of Artificial Sequence: Synthetic polypeptide
GSEPATSGSETPGTSESATPESGPGSEPATSGSETPGSPAGSPTSTEEGTSTEPSEGSAPGSEPATSGSETPGSEPATSGSETPGSEPATSGSETPGTSTEPSEGSAPGTSESATPESGPGSEPATSGSETPGTSTEPSEGSAP

SEQ ID NO: 62 - protein, 144 aa, Artificial Sequence
  Description of Artificial Sequence: Synthetic polypeptide
GTSTPESGSASPGTSPSGESSTAPGTSPSGESSTAPGSTSSTAESPGPGSTSESPSGTAPGSTSSTAESPGPGTSPSGESSTAPGTSTPESGSASPGSTSSTAESPGPGTSPSGESSTAPGTSPSGESSTAPGTSPSGESSTAP

SEQ ID NO: 63 - protein, 288 aa, Artificial Sequence
  Description of Artificial Sequence: Synthetic polypeptide
GTSESATPESGPGSEPATSGSETPGTSESATPESGPGSEPATSGSETPGTSESATPESGPGTSTEPSEGSAPGSPAGSPTSTEEGTSESATPESGPGSEPATSGSETPGTSESATPESGPGSPAGSPTSTEEGSPAGSPTSTEEGTSTEPSEGSAPGTSESATPESGPGTSESATPESGPGTSESATPESGPGSEPATSGSETPGSEPATSGSETPGSPAGSPTSTEEGTSTEPSEGSAPGTSTEPSEGSAPGSEPATSGSETPGTSESATPESGPGTSTEPSEGSAP

SEQ ID NO: 64 - protein, 504 aa, Artificial Sequence
  Description of Artificial Sequence: Synthetic polypeptide
  MOD_RES (63)..(63): Any amino acid
  MOD_RES (207)..(207): Any amino acid
GASPGTSSTGSPGSSPSASTGTGPGSSPSASTGTGPGTPGSGTASSSPGSSTPSGATGSPGSXPSASTGTGPGASPGTSSTGSPGTPGSGTASSSPGSSTPSGATGSPGTPGSGTASSSPGASPGTSSTGSPGASPGTSSTGSPGTPGSGTASSSPGSSTPSGATGSPGASPGTSSTGSPGTPGSGTASSSPGSSTPSGATGSPGSXPSASTGTGPGSSPSASTGTGPGSSTPSGATGSPGSSTPSGATGSPGASPGTSSTGSPGASPGTSSTGSPGASPGTSSTGSPGTPGSGTASSSPGASPGTSSTGSPGASPGTSSTGSPGASPGTSSTGSPGSSPSASTGTGPGTPGSGTASSSPGASPGTSSTGSPGASPGTSSTGSPGASPGTSSTGSPGSSTPSGATGSPGSSTPSGATGSPGASPGTSSTGSPGTPGSGTASSSPGSSTPSGATGSPGSSTPSGATGSPGSSTPSGATGSPGSSPSASTGTGPGASPGTSSTGSP

SEQ ID NO: 65 - protein, 540 aa, Artificial Sequence
  Description of Artificial Sequence: Synthetic polypeptide
GSTSSTAESPGPGSTSSTAESPGPGSTSESPSGTAPGSTSSTAESPGPGSTSSTAESPGPGTSTPESGSASPGSTSESPSGTAPGTSPSGESSTAPGSTSESPSGTAPGSTSESPSGTAPGTSPSGESSTAPGSTSESPSGTAPGSTSESPSGTAPGTSPSGESSTAPGSTSESPSGTAPGSTSESPSGTAPGSTSESPSGTAPGTSTPESGSASPGSTSESPSGTAPGTSTPESGSASPGSTSSTAESPGPGSTSSTAESPGPGTSTPESGSASPGTSTPESGSASPGSTSESPSGTAPGTSTPESGSASPGTSTPESGSASPGSTSESPSGTAPGSTSESPSGTAPGSTSESPSGTAPGSTSSTAESPGPGTSTPESGSASPGTSTPESGSASPGSTSESPSGTAPGSTSESPSGTAPGTSTPESGSASPGSTSESPSGTAPGSTSESPSGTAPGTSTPESGSASPGTSPSGESSTAPGSTSSTAESPGPGTSPSGESSTAPGSTSSTAESPGPGTSTPESGSASPGSTSESPSGTAP

SEQ ID NO: 66 - protein, 576 aa, Artificial Sequence
  Description of Artificial Sequence: Synthetic polypeptide
GSSESGSSEGGPGSGGEPSESGSSGSSESGSSEGGPGSSESGSSEGGPGSSESGSSEGGPGSSESGSSEGGPGSSESGSSEGGPGESPGGSSGSESGSEGSSGPGESSGSSESGSSEGGPGSSESGSSEGGPGSSESGSSEGGPGSGGEPSESGSSGESPGGSSGSESGESPGGSSGSESGSGGEPSESGSSGSSESGSSEGGPGSGGEPSESGSSGSGGEPSESGSSGSEGSSGPGESSGESPGGSSGSESGSGGEPSESGSSGSGGEPSESGSSGSGGEPSESGSSGSSESGSSEGGPGESPGGSSGSESGESPGGSSGSESGESPGGSSGSESGESPGGSSGSESGESPGGSSGSESGSSESGSSEGGPGSGGEPSESGSSGSEGSSGPGESSGSSESGSSEGGPGSGGEPSESGSSGSSESGSSEGGPGSGGEPSESGSSGESPGGSSGSESGESPGGSSGSESGSSESGSSEGGPGSGGEPSESGSSGSSESGSSEGGPGSGGEPSESGSSGSGGEPSESGSSGESPGGSSGSESGSEGSSGPGESSGSSESGSSEGGPGSEGSSGPGESS

SEQ ID NO: 67 - protein, 576 aa, Artificial Sequence
  Description of Artificial Sequence: Synthetic polypeptide
GSPAGSPTSTEEGTSESATPESGPGTSTEPSEGSAPGSPAGSPTSTEEGTSTEPSEGSAPGTSTEPSEGSAPGTSESATPESGPGSEPATSGSETPGSEPATSGSETPGSPAGSPTSTEEGTSESATPESGPGTSTEPSEGSAPGTSTEPSEGSAPGSPAGSPTSTEEGTSTEPSEGSAPGTSTEPSEGSAPGTSESATPESGPGTSTEPSEGSAPGTSESATPESGPGSEPATSGSETPGTSTEPSEGSAPGTSTEPSEGSAPGTSESATPESGPGTSESATPESGPGSPAGSPTSTEEGTSESATPESGPGSEPATSGSETPGTSESATPESGPGTSTEPSEGSAPGTSTEPSEGSAPGTSTEPSEGSAPGTSTEPSEGSAPGTSTEPSEGSAPGTSTEPSEGSAPGSPAGSPTSTEEGTSTEPSEGSAPGTSESATPESGPGSEPATSGSETPGTSESATPESGPGSEPATSGSETPGTSESATPESGPGTSTEPSEGSAPGTSESATPESGPGSPAGSPTSTEEGSPAGSPTSTEEGSPAGSPTSTEEGTSESATPESGPGTSTEPSEGSAP

SEQ ID NO: 68 - protein, 576 aa, Artificial Sequence
  Description of Artificial Sequence: Synthetic polypeptide
GSTSSTAESPGPGSTSSTAESPGPGSTSESPSGTAPGSTSSTAESPGPGSTSSTAESPGPGTSTPESGSASPGSTSESPSGTAPGTSPSGESSTAPGSTSESPSGTAPGSTSESPSGTAPGTSPSGESSTAPGSTSESPSGTAPGSTSESPSGTAPGTSPSGESSTAPGSTSESPSGTAPGSTSESPSGTAPGSTSESPSGTAPGTSTPESGSASPGSTSESPSGTAPGTSTPESGSASPGSTSSTAESPGPGSTSSTAESPGPGTSTPESGSASPGTSTPESGSASPGSTSESPSGTAPGTSTPESGSASPGTSTPESGSASPGSTSESPSGTAPGSTSESPSGTAPGSTSESPSGTAPGSTSSTAESPGPGTSTPESGSASPGTSTPESGSASPGSTSESPSGTAPGSTSESPSGTAPGTSTPESGSASPGSTSESPSGTAPGSTSESPSGTAPGTSTPESGSASPGTSPSGESSTAPGSTSSTAESPGPGTSPSGESSTAPGSTSSTAESPGPGTSTPESGSASPGSTSESPSGTAPGSTSSTAESPGPGTSTPESGSASPGTSTPESGSASP

SEQ ID NO: 69 - protein, 625 aa, Artificial Sequence
  Description of Artificial Sequence: Synthetic polypeptide
MAEPAGSPTSTEEGTPGSGTASSSPGSSTPSGATGSPGASPGTSSTGSPGSPAGSPTSTEEGTSESATPESGPGTSTEPSEGSAPGSPAGSPTSTEEGTSTEPSEGSAPGTSTEPSEGSAPGTSESATPESGPGSEPATSGSETPGSEPATSGSETPGSPAGSPTSTEEGTSESATPESGPGTSTEPSEGSAPGTSTEPSEGSAPGSPAGSPTSTEEGTSTEPSEGSAPGTSTEPSEGSAPGTSESATPESGPGTSTEPSEGSAPGTSESATPESGPGSEPATSGSETPGTSTEPSEGSAPGTSTEPSEGSAPGTSESATPESGPGTSESATPESGPGSPAGSPTSTEEGTSESATPESGPGSEPATSGSETPGTSESATPESGPGTSTEPSEGSAPGTSTEPSEGSAPGTSTEPSEGSAPGTSTEPSEGSAPGTSTEPSEGSAPGTSTEPSEGSAPGSPAGSPTSTEEGTSTEPSEGSAPGTSESATPESGPGSEPATSGSETPGTSESATPESGPGSEPATSGSETPGTSESATPESGPGTSTEPSEGSAPGTSESATPESGPGSPAGSPTSTEEGSPAGSPTSTEEGSPAGSPTSTEEGTSESATPESGPGTSTEPSEGSAP

SEQ ID NO: 70 - protein, 836 aa, Artificial Sequence
  Description of Artificial Sequence: Synthetic polypeptide
GSSESGSSEGGPGSSESGSSEGGPGESPGGSSGSESGSGGEPSESGSSGESPGGSSGSESGESPGGSSGSESGSSESGSSEGGPGSSESGSSEGGPGSSESGSSEGGPGESPGGSSGSESGESPGGSSGSESGESPGGSSGSESGSSESGSSEGGPGSSESGSSEGGPGSSESGSSEGGPGSSESGSSEGGPGSSESGSSEGGPGSSESGSSEGGPGSGGEPSESGSSGESPGGSSGSESGESPGGSSGSESGSGGEPSESGSSGSEGSSGPGESSGSSESGSSEGGPGSGGEPSESGSSGSEGSSGPGESSGSSESGSSEGGPGSGGEPSESGSSGESPGGSSGSESGSGGEPSESGSSGSGGEPSESGSSGSSESGSSEGGPGSGGEPSESGSSGSGGEPSESGSSGSEGSSGPGESSGESPGGSSGSESGSEGSSGPGESSGSEGSSGPGESSGSGGEPSESGSSGSSESGSSEGGPGSSESGSSEGGPGESPGGSSGSESGSGGEPSESGSSGSEGSSGPGESSGESPGGSSGSESGSEGSSGPGSSESGSSEGGPGSGGEPSESGSSGSEGSSGPGESSGSEGSSGPGESSGSEGSSGPGESSGSGGEPSESGSSGSGGEPSESGSSGESPGGSSGSESGESPGGSSGSESGSGGEPSESGSSGSEGSSGPGESSGESPGGSSGSESGSSESGSSEGGPGSSESGSSEGGPGSSESGSSEGGPGSGGEPSESGSSGSSESGSSEGGPGESPGGSSGSESGSGGEPSESGSSGSSESGSSEGGPGESPGGSSGSESGSGGEPSESGSSGESPGGSSGSESGSGGEPSESGSS

SEQ ID NO: 71 - protein, 864 aa, Artificial Sequence
  Description of Artificial Sequence: Synthetic polypeptide
GSPAGSPTSTEEGTSESATPESGPGTSTEPSEGSAPGSPAGSPTSTEEGTSTEPSEGSAPGTSTEPSEGSAPGTSESATPESGPGSEPATSGSETPGSEPATSGSETPGSPAGSPTSTEEGTSESATPESGPGTSTEPSEGSAPGTSTEPSEGSAPGSPAGSPTSTEEGTSTEPSEGSAPGTSTEPSEGSAPGTSESATPESGPGTSTEPSEGSAPGTSESATPESGPGSEPATSGSETPGTSTEPSEGSAPGTSTEPSEGSAPGTSESATPESGPGTSESATPESGPGSPAGSPTSTEEGTSESATPESGPGSEPATSGSETPGTSESATPESGPGTSTEPSEGSAPGTSTEPSEGSAPGTSTEPSEGSAPGTSTEPSEGSAPGTSTEPSEGSAPGTSTEPSEGSAPGSPAGSPTSTEEGTSTEPSEGSAPGTSESATPESGPGSEPATSGSETPGTSESATPESGPGSEPATSGSETPGTSESATPESGPGTSTEPSEGSAPGTSESATPESGPGSPAGSPTSTEEGSPAGSPTSTEEGSPAGSPTSTEEGTSESATPESGPGTSTEPSEGSAPGTSESATPESGPGSEPATSGSETPGTSESATPESGPGSEPATSGSETPGTSESATPESGPGTSTEPSEGSAPGSPAGSPTSTEEGTSESATPESGPGSEPATSGSETPGTSESATPESGPGSPAGSPTSTEEGSPAGSPTSTEEGTSTEPSEGSAPGTSESATPESGPGTSESATPESGPGTSESATPESGPGSEPATSGSETPGSEPATSGSETPGSPAGSPTSTEEGTSTEPSEGSAPGTSTEPSEGSAPGSEPATSGSETPGTSESATPESGPGTSTEPSEGSAP

SEQ ID NO: 72 - protein, 875 aa, Artificial Sequence
  Description of Artificial Sequence: Synthetic polypeptide
  MOD_RES (430)..(432): Any amino acid
  MOD_RES (443)..(446): Any amino acid
GSTSESPSGTAPGTSPSGESSTAPGSTSESPSGTAPGSTSESPSGTAPGTSTPESGSASPGTSTPESGSASPGSTSESPSGTAPGSTSESPSGTAPGTSPSGESSTAPGSTSESPSGTAPGTSPSGESSTAPGTSPSGESSTAPGSTSSTAESPGPGTSPSGESSTAPGTSPSGESSTAPGSTSSTAESPGPGTSTPESGSASPGTSTPESGSASPGSTSESPSGTAPGSTSESPSGTAPGTSTPESGSASPGSTSSTAESPGPGTSTPESGSASPGSTSESPSGTAPGTSPSGESSTAPGSTSSTAESPGPGTSPSGESSTAPGTSTPESGSASPGSTSSTAESPGPGSTSSTAESPGPGSTSSTAESPGPGSTSSTAESPGPGTSPSGESSTAPGSTSESPSGTAPGSTSESPSGTAPGTSTPESGPXXXGASASGAPSTXXXXSESPSGTAPGSTSESPSGTAPGSTSESPSGTAPGSTSESPSGTAPGSTSESPSGTAPGSTSESPSGTAPGTSTPESGSASPGTSPSGESSTAPGTSPSGESSTAPGSTSSTAESPGPGTSPSGESSTAPGTSTPESGSASPGSTSESPSGTAPGSTSESPSGTAPGTSPSGESSTAPGSTSESPSGTAPGTSTPESGSASPGTSTPESGSASPGSTSESPSGTAPGTSTPESGSASPGSTSSTAESPGPGSTSESPSGTAPGSTSESPSGTAPGTSPSGESSTAPGSTSSTAESPGPGTSPSGESSTAPGTSTPESGSASPGTSPSGESSTAPGTSPSGESSTAPGTSPSGESSTAPGSTSSTAESPGPGSTSSTAESPGPGTSPSGESSTAPGSSPSASTGTGPGSSTPSGATGSPGSSTPSGATGSP

SEQ ID NO: 73 - protein, 864 aa, Artificial Sequence
  Description of Artificial Sequence: Synthetic polypeptide
GASPGTSSTGSPGSSPSASTGTGPGSSPSASTGTGPGTPGSGTASSSPGSSTPSGATGSPGSSPSASTGTGPGASPGTSSTGSPGTPGSGTASSSPGSSTPSGATGSPGTPGSGTASSSPGASPGTSSTGSPGASPGTSSTGSPGTPGSGTASSSPGSSTPSGATGSPGASPGTSSTGSPGTPGSGTASSSPGSSTPSGATGSPGSSPSASTGTGPGSSPSASTGTGPGSSTPSGATGSPGSSTPSGATGSPGASPGTSSTGSPGASPGTSSTGSPGASPGTSSTGSPGTPGSGTASSSPGASPGTSSTGSPGASPGTSSTGSPGASPGTSSTGSPGSSPSASTGTGPGTPGSGTASSSPGASPGTSSTGSPGASPGTSSTGSPGASPGTSSTGSPGSSTPSGATGSPGSSTPSGATGSPGASPGTSSTGSPGTPGSGTASSSPGSSTPSGATGSPGSSTPSGATGSPGSSTPSGATGSPGSSPSASTGTGPGASPGTSSTGSPGASPGTSSTGSPGTPGSGTASSSPGASPGTSSTGSPGASPGTSSTGSPGASPGTSSTGSPGASPGTSSTGSPGTPGSGTASSSPGSSTPSGATGSPGTPGSGTASSSPGSSTPSGATGSPGTPGSGTASSSPGSSTPSGATGSPGSSTPSGATGSPGSSPSASTGTGPGSSPSASTGTGPGASPGTSSTGSPGTPGSGTASSSPGSSTPSGATGSPGSSPSASTGTGPGSSPSASTGTGPGASPGTSSTGSPGASPGTSSTGSPGSSTPSGATGSPGSSPSASTGTGPGASPGTSSTGSPGSSPSASTGTGPGTPGSGTASSSPGSSTPSGATGSPGSSTPSGATGSPGASPGTSSTGSP

SEQ ID NO: 74 - protein, 875 aa, Artificial Sequence
  Description of Artificial Sequence: Synthetic polypeptide
GTSTEPSEGSAPGSEPATSGSETPGSPAGSPTSTEEGSTSSTAESPGPGTSTPESGSASPGSTSESPSGTAPGSTSESPSGTAPGTSTPESGSASPGTSTPESGSASPGSEPATSGSETPGTSESATPESGPGSPAGSPTSTEEGTSTEPSEGSAPGTSESATPESGPGTSTEPSEGSAPGTSTEPSEGSAPGSPAGSPTSTEEGTSTEPSEGSAPGTSTEPSEGSAPGTSESATPESGPGTSESATPESGPGTSTEPSEGSAPGTSTEPSEGSAPGTSESATPESGPGTSTEPSEGSAPGSEPATSGSETPGSPAGSPTSTEEGSSTPSGATGSPGTPGSGTASSSPGSSTPSGATGSPGTSTEPSEGSAPGTSTEPSEGSAPGSEPATSGSETPGSPAGSPTSTEEGSPAGSPTSTEEGTSTEPSEGSAPGASASGAPSTGGTSESATPESGPGSPAGSPTSTEEGSPAGSPTSTEEGSTSSTAESPGPGSTSESPSGTAPGTSPSGESSTAPGTPGSGTASSSPGSSTPSGATGSPGSSPSASTGTGPGSEPATSGSETPGTSESATPESGPGSEPATSGSETPGSTSSTAESPGPGSTSSTAESPGPGTSPSGESSTAPGSEPATSGSETPGSEPATSGSETPGTSTEPSEGSAPGSTSSTAESPGPGTSTPESGSASPGSTSESPSGTAPGTSTEPSEGSAPGTSTEPSEGSAPGTSTEPSEGSAPGSSTPSGATGSPGSSPSASTGTGPGASPGTSSTGSPGSEPATSGSETPGTSESATPESGPGSPAGSPTSTEEGSSTPSGATGSPGSSPSASTGTGPGASPGTSSTGSPGTSESATPESGPGTSTEPSEGSAPGTSTEPSEGSAP

SEQ ID NO: 75 - protein, 913 aa, Artificial Sequence
  Description of Artificial Sequence: Synthetic polypeptide
MAEPAGSPTSTEEGTPGSGTASSSPGSSTPSGATGSPGASPGTSSTGSPGSPAGSPTSTEEGTSESATPESGPGTSTEPSEGSAPGSPAGSPTSTEEGTSTEPSEGSAPGTSTEPSEGSAPGTSESATPESGPGSEPATSGSETPGSEPATSGSETPGSPAGSPTSTEEGTSESATPESGPGTSTEPSEGSAPGTSTEPSEGSAPGSPAGSPTSTEEGTSTEPSEGSAPGTSTEPSEGSAPGTSESATPESGPGTSTEPSEGSAPGTSESATPESGPGSEPATSGSETPGTSTEPSEGSAPGTSTEPSEGSAPGTSESATPESGPGTSESATPESGPGSPAGSPTSTEEGTSESATPESGPGSEPATSGSETPGTSESATPESGPGTSTEPSEGSAPGTSTEPSEGSAPGTSTEPSEGSAPGTSTEPSEGSAPGTSTEPSEGSAPGTSTEPSEGSAPGSPAGSPTSTEEGTSTEPSEGSAPGTSESATPESGPGSEPATSGSETPGTSESATPESGPGSEPATSGSETPGTSESATPESGPGTSTEPSEGSAPGTSESATPESGPGSPAGSPTSTEEGSPAGSPTSTEEGSPAGSPTSTEEGTSESATPESGPGTSTEPSEGSAPGTSESATPESGPGSEPATSGSETPGTSESATPESGPGSEPATSGSETPGTSESATPESGPGTSTEPSEGSAPGSPAGSPTSTEEGTSESATPESGPGSEPATSGSETPGTSESATPESGPGSPAGSPTSTEEGSPAGSPTSTEEGTSTEPSEGSAPGTSESATPESGPGTSESATPESGPGTSESATPESGPGSEPATSGSETPGSEPATSGSETPGSPAGSPTSTEEGTSTEPSEGSAPGTSTEPSEGSAPGSEPATSGSETPGTSESATPESGPGTSTEPSEGSAP

SEQ ID NO: 76 - protein, 924 aa, Artificial Sequence
  Description of Artificial Sequence: Synthetic polypeptide
MAEPAGSPTSTEEGASPGTSSTGSPGSSTPSGATGSPGSSTPSGATGSPGTSTEPSEGSAPGSEPATSGSETPGSPAGSPTSTEEGSTSSTAESPGPGTSTPESGSASPGSTSESPSGTAPGSTSESPSGTAPGTSTPESGSASPGTSTPESGSASPGSEPATSGSETPGTSESATPESGPGSPAGSPTSTEEGTSTEPSEGSAPGTSESATPESGPGTSTEPSEGSAPGTSTEPSEGSAPGSPAGSPTSTEEGTSTEPSEGSAPGTSTEPSEGSAPGTSESATPESGPGTSESATPESGPGTSTEPSEGSAPGTSTEPSEGSAPGTSESATPESGPGTSTEPSEGSAPGSEPATSGSETPGSPAGSPTSTEEGSSTPSGATGSPGTPGSGTASSSPGSSTPSGATGSPGTSTEPSEGSAPGTSTEPSEGSAPGSEPATSGSETPGSPAGSPTSTEEGSPAGSPTSTEEGTSTEPSEGSAPGASASGAPSTGGTSESATPESGPGSPAGSPTSTEEGSPAGSPTSTEEGSTSSTAESPGPGSTSESPSGTAPGTSPSGESSTAPGTPGSGTASSSPGSSTPSGATGSPGSSPSASTGTGPGSEPATSGSETPGTSESATPESGPGSEPATSGSETPGSTSSTAESPGPGSTSSTAESPGPGTSPSGESSTAPGSEPATSGSETPGSEPATSGSETPGTSTEPSEGSAPGSTSSTAESPGPGTSTPESGSASPGSTSESPSGTAPGTSTEPSEGSAPGTSTEPSEGSAPGTSTEPSEGSAPGSSTPSGATGSPGSSPSASTGTGPGASPGTSSTGSPGSEPATSGSETPGTSESATPESGPGSPAGSPTSTEEGSSTPSGATGSPGSSPSASTGTGPGASPGTSSTGSPGTSESATPESGPGTSTEPSEGSAPGTSTEPSEGSAP

SEQ ID NO: 77 - protein, 1318 aa, Artificial Sequence
  Description of Artificial Sequence: Synthetic polypeptide
GTSTEPSEGSAPGSEPATSGSETPGSPAGSPTSTEEGSTSSTAESPGPGTSTPESGSASPGSTSESPSGTAPGSTSESPSGTAPGTSTPESGSASPGTSTPESGSASPGSEPATSGSETPGTSESATPESGPGSPAGSPTSTEEGTSTEPSEGSAPGTSESATPESGPGTSTEPSEGSAPGTSTEPSEGSAPGSPAGSPTSTEEGTSTEPSEGSAPGTSTEPSEGSAPGTSESATPESGPGTSESATPESGPGTSTEPSEGSAPGTSTEPSEGSAPGTSESATPESGPGTSTEPSEGSAPGSEPATSGSETPGSPAGSPTSTEEGSSTPSGATGSPGTPGSGTASSSPGSSTPSGATGSPGTSTEPSEGSAPGTSTEPSEGSAPGSEPATSGSETPGSPAGSPTSTEEGSPAGSPTSTEEGTSTEPSEGSAPGPEPTGPAPSGGSEPATSGSETPGTSESATPESGPGSPAGSPTSTEEGTSESATPESGPGSPAGSPTSTEEGSPAGSPTSTEEGTSESATPESGPGSPAGSPTSTEEGSPAGSPTSTEEGSTSSTAESPGPGSTSESPSGTAPGTSPSGESSTAPGSTSESPSGTAPGSTSESPSGTAPGTSPSGESSTAPGTSTEPSEGSAPGTSESATPESGPGTSESATPESGPGSEPATSGSETPGTSESATPESGPGTSESATPESGPGTSTEPSEGSAPGTSESATPESGPGTSTEPSEGSAPGTSPSGESSTAPGTSPSGESSTAPGTSPSGESSTAPGTSTEPSEGSAPGSPAGSPTSTEEGTSTEPSEGSAPGSSPSASTGTGPGSSTPSGATGSPGSSTPSGATGSPGSSTPSGATGSPGSSTPSGATGSPGASPGTSSTGSPGASASGAPSTGGTSPSGESSTAPGSTSSTAESPGPGTSPSGESSTAPGTSESATPESGPGTSTEPSEGSAPGTSTEPSEGSAPGSSPSASTGTGPGSSTPSGATGSPGASPGTSSTGSPGTSTPESGSASPGTSPSGESSTAPGTSPSGESSTAPGTSESATPESGPGSEPATSGSETPGTSTEPSEGSAPGSTSESPSGTAPGSTSESPSGTAPGTSTPESGSASPGSPAGSPTSTEEGTSESATPESGPGTSTEPSEGSAPGSPAGSPTSTEEGTSESATPESGPGSEPATSGSETPGSSTPSGATGSPGASPGTSSTGSPGSSTPSGATGSPGSTSESPSGTAPGTSPSGESSTAPGSTSSTAESPGPGSSTPSGATGSPGASPGTSSTGSPGTPGSGTASSSPGSPAGSPTSTEEGSPAGSPTSTEEGTSTEPSEGSAP

SEQ ID NO: 78 - protein, 864 aa, Artificial Sequence
  Description of Artificial Sequence: Synthetic polypeptide
GTSTEPSEPGSAGTSTEPSEPGSAGSEPATSGTEPSGSGASEPTSTEPGSEPATSGTEPSGSEPATSGTEPSGSEPATSGTEPSGSGASEPTSTEPGTSTEPSEPGSAGSEPATSGTEPSGTSTEPSEPGSAGSEPATSGTEPSGSEPATSGTEPSGTSTEPSEPGSAGTSTEPSEPGSAGSEPATSGTEPSGSEPATSGTEPSGTSEPSTSEPGAGSGASEPTSTEPGTSEPSTSEPGAGSEPATSGTEPSGSEPATSGTEPSGTSTEPSEPGSAGTSTEPSEPGSAGSGASEPTSTEPGSEPATSGTEPSGSEPATSGTEPSGSEPATSGTEPSGSEPATSGTEPSGTSTEPSEPGSAGSEPATSGTEPSGSGASEPTSTEPGTSTEPSEPGSAGSEPATSGTEPSGSGASEPTSTEPGTSTEPSEPGSAGSGASEPTSTEPGSEPATSGTEPSGSGASEPTSTEPGSEPATSGTEPSGSGASEPTSTEPGTSTEPSEPGSAGSEPATSGTEPSGSGASEPTSTEPGTSTEPSEPGSAGSEPATSGTEPSGTSTEPSEPGSAGSEPATSGTEPSGTSTEPSEPGSAGTSTEPSEPGSAGTSTEPSEPGSAGTSTEPSEPGSAGTSTEPSEPGSAGTSTEPSEPGSAGTSEPSTSEPGAGSGASEPTSTEPGTSTEPSEPGSAGTSTEPSEPGSAGTSTEPSEPGSAGSEPATSGTEPSGSGASEPTSTEPGSEPATSGTEPSGSEPATSGTEPSGSEPATSGTEPSGSEPATSGTEPSGTSEPSTSEPGAGSEPATSGTEPSGSGASEPTSTEPGTSTEPSEPGSAGSEPATSGTEPSGSGASEPTSTEPGTSTEPSEPGSA

SEQ ID NO: 79 - protein, 864 aa, Artificial Sequence
  Description of Artificial Sequence: Synthetic polypeptide
GSETATSGSETAGTSESATSESGAGSTAGSETSTEAGTSESATSESGAGSETATSGSETAGSETATSGSETAGTSTEASEGSASGTSTEASEGSASGTSESATSESGAGSETATSGSETAGTSTEASEGSASGSTAGSETSTEAGTSESATSESGAGTSESATSESGAGSETATSGSETAGTSESATSESGAGTSTEASEGSASGSETATSGSETAGSETATSGSETAGTSTEASEGSASGSTAGSETSTEAGTSESATSESGAGTSTEASEGSASGSETATSGSETAGSTAGSETSTEAGSTAGSETSTEAGSETATSGSETAGTSESATSESGAGTSESATSESGAGSETATSGSETAGTSESATSESGAGTSESATSESGAGSETATSGSETAGSETATSGSETAGTSTEASEGSASGSTAGSETSTEAGSETATSGSETAGTSESATSESGAGSTAGSETSTEAGSTAGSETSTEAGSTAGSETSTEAGTSTEASEGSASGSTAGSETSTEAGSTAGSETSTEAGTSTEASEGSASGSTAGSETSTEAGSETATSGSETAGTSTEASEGSASGTSESATSESGAGSETATSGSETAGTSESATSESGAGTSESATSESGAGSETATSGSETAGTSESATSESGAGSETATSGSETAGTSTEASEGSASGTSTEASEGSASGSTAGSETSTEAGSTAGSETSTEAGSETATSGSETAGTSESATSESGAGTSESATSESGAGSETATSGSETAGSETATSGSETAGSETATSGSETAGTSTEASEGSASGTSESATSESGAGSETATSGSETAGSETATSGSETAGTSESATSESGAGTSESATSESGAGSETATSGSETA

SEQ ID NO: 80 - protein, 48 aa, Artificial Sequence; identical to SEQ ID NO: 59
  Description of Artificial Sequence: Synthetic polypeptide

SEQ ID NO: 81 - protein, 48 aa, Artificial Sequence; identical to SEQ ID NO: 60
  Description of Artificial Sequence: Synthetic polypeptide

SEQ ID NO: 82 - protein, 8 aa, Artificial Sequence
  Description of Artificial Sequence: Synthetic peptide
LTPRSLLV

SEQ ID NO: 83 - protein, 8 aa, Artificial Sequence
  Description of Artificial Sequence: Synthetic peptide
LTPRSLLV

SEQ ID NO: 84 - protein, 8 aa, Artificial Sequence
  Description of Artificial Sequence: Synthetic peptide
KLTRVVGG

SEQ ID NO: 85 - protein, 8 aa, Artificial Sequence
  Description of Artificial Sequence: Synthetic peptide
TMTRIVGG

SEQ ID NO: 86 - protein, 8 aa, Artificial Sequence
  Description of Artificial Sequence: Synthetic peptide
SPFRSTGG

SEQ ID NO: 87 - protein, 8 aa, Artificial Sequence
  Description of Artificial Sequence: Synthetic peptide
LQVRIVGG

SEQ ID NO: 88 - protein, 8 aa, Artificial Sequence
  Description of Artificial Sequence: Synthetic peptide
PLGRIVGG

SEQ ID NO: 89 - protein, 8 aa, Artificial Sequence
  Description of Artificial Sequence: Synthetic peptide
IEGRTVGG

SEQ ID NO: 90 - protein, 8 aa, Artificial Sequence
  Description of Artificial Sequence: Synthetic peptide
LTPRSLLV

SEQ ID NO: 91 - protein, 8 aa, Artificial Sequence
  Description of Artificial Sequence: Synthetic peptide
LGPVSGVP

SEQ ID NO: 92 - protein, 8 aa, Artificial Sequence
  Description of Artificial Sequence: Synthetic peptide
VAGDSLEE

SEQ ID NO: 93 - protein, 8 aa, Artificial Sequence
  Description of Artificial Sequence: Synthetic peptide
GPAGLGGA

SEQ ID NO: 94 - protein, 8 aa, Artificial Sequence
  Description of Artificial Sequence: Synthetic peptide
  MOD_RES (2)..(2): Pro or Ala
  MOD_RES (3)..(3): Any amino acid
  MOD_RES (6)..(6): Any amino acid
  MOD_RES (8)..(8): Any amino acid
GXXGLXGX

SEQ ID NO: 95 - protein, 8 aa, Artificial Sequence
  Description of Artificial Sequence: Synthetic peptide
GPAGLRGA

SEQ ID NO: 96 - protein, 8 aa, Artificial Sequence
  Description of Artificial Sequence: Synthetic peptide
  MOD_RES (3)..(3): Any amino acid
  MOD_RES (6)..(6): Any amino acid
  MOD_RES (7)..(7): Gly or Ala
  MOD_RES (8)..(8): Any amino acid
GPXGLXXX

SEQ ID NO: 97 - protein, 8 aa, Artificial Sequence
  Description of Artificial Sequence: Synthetic peptide
APLGLRLR

SEQ ID NO: 98 - protein, 8 aa, Artificial Sequence
  Description of Artificial Sequence: Synthetic peptide
PALPLVAQ

SEQ ID NO: 99 - protein, 7 aa, Artificial Sequence
  Description of Artificial Sequence: Synthetic peptide
ENLYFQG

SEQ ID NO: 100 - protein, 8 aa, Artificial Sequence
  Description of Artificial Sequence: Synthetic peptide
ENLYFQGS

SEQ ID NO: 101 - protein, 8 aa, Artificial Sequence
  Description of Artificial Sequence: Synthetic peptide
DDDKIVGG

SEQ ID NO: 102 - protein, 8 aa, Artificial Sequence
  Description of Artificial Sequence: Synthetic peptide
DDDKIVGG

SEQ ID NO: 103 - protein, 8 aa, Artificial Sequence
  Description of Artificial Sequence: Synthetic peptide
LEVLFQGP

SEQ ID NO: 104 - protein, 8 aa, Artificial Sequence
  Description of Artificial Sequence: Synthetic peptide
LEVLFQGP

SEQ ID NO: 105 - protein, 8 aa, Artificial Sequence
  Description of Artificial Sequence: Synthetic peptide
LPKTGSES

SEQ ID NO: 106 - protein, 8 aa, Artificial Sequence
  Description of Artificial Sequence: Synthetic peptide
  MOD_RES (3)..(3): Lys, Glu, Ala or Asp
  MOD_RES (6)..(6): Any amino acid
  MOD_RES (7)..(7): Glu, Lys or Ser
LPXTGXXS

SEQ ID NO: 107 - DNA, 144 bp, Artificial Sequence
  Description of Artificial Sequence: Synthetic polynucleotide
atggctgaacctgctggctctccaacctccactgaggaaggtaccccgggtagcggtactgcttcttcctctccaggtagctctaccccttctggtgcaaccggctctccaggtgcttctccgggcaccagctctaccggttct

SEQ ID NO: 108 - DNA, 144 bp, Artificial Sequence
  Description of Artificial Sequence: Synthetic polynucleotide
atggctgaacctgctggctctccaacctccactgaggaaggtgcatccccgggcaccagctctaccggttctccaggtagctctaccccgtctggtgctaccggctctccaggtagctctaccccgtctggtgctactggctct

SEQ ID NO: 109 - DNA, 432 bp, Artificial Sequence
  Description of Artificial Sequence: Synthetic polynucleotide
ggtagcgaaccggcaacttccggctctgaaaccccaggtacttctgaaagcgctactcctgagtctggcccaggtagcgaacctgctacctctggctctgaaaccccaggtagcccggcaggctctccgacttccaccgaggaaggtacctctactgaaccttctgagggtagcgctccaggtagcgaaccggcaacctctggctctgaaaccccaggtagcgaacctgctacctccggctctgaaactccaggtagcgaaccggctacttccggttctgaaactccaggtacctctaccgaaccttccgaaggcagcgcaccaggtacttctgaaagcgcaacccctgaatccggtccaggtagcgaaccggctacttctggctctgagactccaggtacttctaccgaaccgtccgaaggtagcgcacca

SEQ ID NO: 110 - DNA, 432 bp, Artificial Sequence
  Description of Artificial Sequence: Synthetic polynucleotide
ggtacttctactccggaaagcggttccgcatctccaggtacttctcctagcggtgaatcttctactgctccaggtacctctcctagcggcgaatcttctactgctccaggttctaccagctctaccgctgaatctcctggcccaggttctaccagcgaatccccgtctggcaccgcaccaggttctactagctctaccgcagaatctccgggtccaggtacttcccctagcggtgaatcttctactgctccaggtacctctactccggaaagcggctccgcatctccaggttctactagctctactgctgaatctcctggtccaggtacctcccctagcggcgaatcttctactgctccaggtacctctcctagcggcgaatcttctaccgctccaggtacctcccctagcggtgaatcttctaccgcacca

SEQ ID NO: 111 - DNA, 864 bp, Artificial Sequence
  Description of Artificial Sequence: Synthetic polynucleotide
ggtacctctgaaagcgcaactcctgagtctggcccaggtagcgaacctgctacctccggctctgagactccaggtacctctgaaagcgcaaccccggaatctggtccaggtagcgaacctgcaacctctggctctgaaaccccaggtacctctgaaagcgctactcctgaatctggcccaggtacttctactgaaccgtccgagggcagcgcaccaggtagccctgctggctctccaacctccaccgaagaaggtacctctgaaagcgcaacccctgaatccggcccaggtagcgaaccggcaacctccggttctgaaaccccaggtacttctgaaagcgctactcctgagtccggcccaggtagcccggctggctctccgacttccaccgaggaaggtagcccggctggctctccaacttctactgaagaaggtacttctaccgaaccttccgagggcagcgcaccaggtacttctgaaagcgctacccctgagtccggcccaggtacttctgaaagcgctactcctgaatccggtccaggtacttctgaaagcgctaccccggaatctggcccaggtagcgaaccggctacttctggttctgaaaccccaggtagcgaaccggctacctccggttctgaaactccaggtagcccagcaggctctccgacttccactgaggaaggtacttctactgaaccttccgaaggcagcgcaccaggtacctctactgaaccttctgagggcagcgctccaggtagcgaacctgcaacctctggctctgaaaccccaggtacctctgaaagcgctactcctgaatctggcccaggtacttctactgaaccgtccgagggcagcgcacca

SEQ ID NO: 112 - DNA, 1728 bp, Artificial Sequence
  Description of Artificial Sequence: Synthetic polynucleotide
ggtagcccggctggctctcctacctctactgaggaaggtacttctgaaagcgctactcctgagtctggtccaggtacctctactgaaccgtccgaaggtagcgctccaggtagcccagcaggctctccgacttccactgaggaaggtacttctactgaaccttccgaaggcagcgcaccaggtacctctactgaaccttctgagggcagcgctccaggtacttctgaaagcgctaccccggaatctggcccaggtagcgaaccggctacttctggttctgaaaccccaggtagcgaaccggctacctccggttctgaaactccaggtagcccggcaggctctccgacctctactgaggaaggtacttctgaaagcgcaaccccggagtccggcccaggtacctctaccgaaccgtctgagggcagcgcaccaggtacttctaccgaaccgtccgagggtagcgcaccaggtagcccagcaggttctcctacctccaccgaggaaggtacttctaccgaaccgtccgagggtagcgcaccaggtacctctactgaaccttctgagggcagcgctccaggtacttctgaaagcgctaccccggagtccggtccaggtacttctactgaaccgtccgaaggtagcgcaccaggtacttctgaaagcgcaacccctgaatccggtccaggtagcgaaccggctacttctggctctgagactccaggtacttctaccgaaccgtccgaaggtagcgcaccaggtacttctactgaaccgtctgaaggtagcgcaccaggtacttctgaaagcgcaaccccggaatccggcccaggtacctctgaaagcgcaaccccggagtccggcccaggtagccctgctggctctccaacctccaccgaagaaggtacctctgaaagcgcaacccctgaatccggcccaggtagcgaaccggcaacctccggttctgaaaccccaggtacctctgaaagcgctactccggagtctggcccaggtacctctactgaaccgtctgagggtagcgctccaggtacttctactgaaccgtccgaaggtagcgcaccaggtacttctaccgaaccgtccgaaggcagcgctccaggtacctctactgaaccttccgagggcagcgctccaggtacctctaccgaaccttctgaaggtagcgcaccaggtacttctaccgaaccgtccgagggtagcgcaccaggtagcccagcaggttctcctacctccaccgaggaaggtacttctaccgaaccgtccgagggtagcgcaccaggtacctctgaaagcgcaactcctgagtctggcccaggtagcgaacctgctacctccggctctgagactccaggtacctctgaaagcgcaaccccggaatctggtccaggtagcgaacctgcaacctctggctctgaaaccccaggtacctctgaaagcgctactcctgaatctggcccaggtacttctactgaaccgtccgagggcagcgcaccaggtacttctgaaagcgctactcctgagtccggcccaggtagcccggctggctctccgacttccaccgaggaaggtagcccggctggctctccaacttctactgaagaaggtagcccggcaggctctccgacctctactgaggaaggtacttctgaaagcgcaaccccggagtccggcccaggtacctctaccgaaccgtctgagggcagcgcacca

SEQ ID NO: 113 - DNA, 1728 bp, Artificial Sequence
  Description of Artificial Sequence: Synthetic polynucleotide
ggttctactagctctaccgctgaatctcctggcccaggttccactagctctaccgcagaatctccgggcccaggttctactagcgaatccccttctggtaccgctccaggttctactagctctaccgctgaatctccgggtccaggttctaccagctctactgcagaatctcctggcccaggtacttctactccggaaagcggttccgcttctccaggttctaccagcgaatctccttctggcaccgctccaggtacctctcctagcggcgaatcttctaccgctccaggttctactagcgaatctccttctggcactgcaccaggttctaccagcgaatctccttctggcaccgctccaggtacctctcctagcggcgaatcttctaccgctccaggttctactagcgaatctccttctggcactgcaccaggttctaccagcgaatctccttctggcaccgctccaggtacctctcctagcggcgaatcttctaccgctccaggttctactagcgaatctccttctggcactgcaccaggttctactagcgaatctccttctggcactgcaccaggttctaccagcgaatctccgtctggcactgcaccaggtacctctacccctgaaagcggttccgcttctccaggttctactagcgaatctccttctggtaccgctccaggtacttctacccctgaaagcggctccgcttctccaggttccactagctctaccgctgaatctccgggtccaggttctactagctctactgcagaatctcctggcccaggtacctctactccggaaagcggctctgcatctccaggtacttctacccctgaaagcggttctgcatctccaggttctactagcgaatccccgtctggtaccgcaccaggtacttctaccccggaaagcggctctgcttctccaggtacttctaccccggaaagcggctccgcatctccaggttctactagcgaatctccttctggtaccgctccaggttctaccagcgaatccccgtctggtactgctccaggttctaccagcgaatctccttctggtactgcaccaggttctactagctctactgcagaatctcctggcccaggtacctctactccggaaagcggctctgcatctccaggtacttctacccctgaaagcggttctgcatctccaggttctactagcgaatctccttctggcactgcaccaggttctaccagcgaatctccgtctggcactgcaccaggtacctctacccctgaaagcggttccgcttctccaggttctactagcgaatctccttctggcactgcaccaggttctaccagcgaatctccgtctggcactgcaccaggtacctctacccctgaaagcggttccgcttctccaggtacttctccgagcggtgaatcttctaccgcaccaggttctactagctctaccgctgaatctccgggcccaggtacttctccgagcggtgaatcttctactgctccaggttccactagctctactgctgaatctcctggcccaggtacttctactccggaaagcggttccgcttctccaggttctactagcgaatctccgtctggcaccgcaccaggttctactagctctactgcagaatctcctggcccaggtacctctactccggaaagcggctctgcatctccaggtacttctacccctgaaagcggttctgcatctcca

SEQ ID NO: 114 - DNA, 1875 bp, Artificial Sequence
  Description of Artificial Sequence: Synthetic polynucleotide
atggctgaacctgctggctctccaacctccactgaggaaggtaccccgggtagcggtactgcttcttcctctccaggtagctctaccccttctggtgcaaccggctctccaggtgcttctccgggcaccagctctaccggttctccaggtagcccggctggctctcctacctctactgaggaaggtacttctgaaagcgctactcctgagtctggtccaggtacctctactgaaccgtccgaaggtagcgctccaggtagcccagcaggctctccgacttccactgaggaaggtacttctactgaaccttccgaaggcagcgcaccaggtacctctactgaaccttctgagggcagcgctccaggtacttctgaaagcgctaccccggaatctggcccaggtagcgaaccggctacttctggttctgaaaccccaggtagcgaaccggctacctccggttctgaaactccaggtagcccggcaggctctccgacctctactgaggaaggtacttctgaaagcgcaaccccggagtccggcccaggtacctctaccgaaccgtctgagggcagcgcaccaggtacttctaccgaaccgtccgagggtagcgcaccaggtagcccagcaggttctcctacctccaccgaggaaggtacttctaccgaaccgtccgagggtagcgcaccaggtacctctactgaaccttctgagggcagcgctccaggtacttctgaaagcgctaccccggagtccggtccaggtacttctactgaaccgtccgaaggtagcgcaccaggtacttctgaaagcgcaacccctgaatccggtccaggtagcgaaccggctacttctggctctgagactccaggtacttctaccgaaccgtccgaaggtagcgcaccaggtacttctactgaaccgtctgaaggtagcgcaccaggtacttctgaaagcgcaaccccggaatccggcccaggtacctctgaaagcgcaaccccggagtccggcccaggtagccctgctggctctccaacctccaccgaagaaggtacctctgaaagcgcaacccctgaatccggcccaggtagcgaaccggcaacctccggttctgaaaccccaggtacctctgaaagcgctactccggagtctggcccaggtacctctactgaaccgtctgagggtagcgctccaggtacttctactgaaccgtccgaaggtagcgcaccaggtacttctaccgaaccgtccgaaggcagcgctccaggtacctctactgaaccttccgagggcagcgctccaggtacctctaccgaaccttctgaaggtagcgcaccaggtacttctaccgaaccgtccgagggtagcgcaccaggtagcccagcaggttctcctacctccaccgaggaaggtacttctaccgaaccgtccgagggtagcgcaccaggtacctctgaaagcgcaactcctgagtctggcccaggtagcgaacctgctacctccggctctgagactccaggtacctctgaaagcgcaaccccggaatctggtccaggtagcgaacctgcaacctctggctctgaaaccccaggtacctctgaaagcgctactcctgaatctggcccaggtacttctactgaaccgtccgagggcagcgcaccaggtacttctgaaagcgctactcctgagtccggcccaggtagcccggctggctctccgacttccaccgaggaaggtagcccggctggctctccaacttctactgaagaaggtagcccggcaggctctccgacctctactgaggaaggtacttctgaaagcgcaaccccggagtccggcccaggtacctctaccgaaccgtctgagggcagcgcacca

SEQ ID NO: 115 - DNA, 2625 bp, Artificial Sequence
  Description of Artificial Sequence: Synthetic polynucleotide
ggtacttctactgaaccgtctgaaggcagcgcaccaggtagcgaaccggctacttccggttctgaaaccccaggtagcccagcaggttctccaacttctactgaagaaggttctaccagctctaccgcagaatctcctggtccaggtacctctactccggaaagcggctctgcatctccaggttctactagcgaatctccttctggcactgcaccaggttctactagcgaatccccgtctggtactgctccaggtacttctactcctgaaagcggttccgcttctccaggtacctctactccggaaagcggttctgcatctccaggtagcgaaccggcaacctccggctctgaaaccccaggtacctctgaaagcgctactcctgaatccggcccaggtagcccggcaggttctccgacttccactgaggaaggtacctctactgaaccttctgagggcagcgctccaggtacttctgaaagcgctaccccggagtccggtccaggtacttctactgaaccgtccgaaggtagcgcaccaggtacttctaccgaaccgtccgagggtagcgcaccaggtagcccagcaggttctcctacctccaccgaggaaggtacttctaccgaaccgtccgagggtagcgcaccaggtacttctaccgaaccttccgagggcagcgcaccaggtacttctgaaagcgctacccctgagtccggcccaggtacttctgaaagcgctactcctgaatccggtccaggtacctctactgaaccttccgaaggcagcgctccaggtacctctaccgaaccgtccgagggcagcgcaccaggtacttctgaaagcgcaacccctgaatccggtccaggtacttctactgaaccttccgaaggtagcgctccaggtagcgaacctgctacttctggttctgaaaccccaggtagcccggctggctctccgacctccaccgaggaaggtagctctaccccgtctggtgctactggttctccaggtactccgggcagcggtactgcttcttcctctccaggtagctctaccccttctggtgctactggctctccaggtacctctaccgaaccgtccgagggtagcgcaccaggtacctctactgaaccgtctgagggtagcgctccaggtagcgaaccggcaacctccggttctgaaactccaggtagccctgctggctctccgacttctactgaggaaggtagcccggctggttctccgacttctactgaggaaggtacttctaccgaaccttccgaaggtagcgctccaggtgcaagcgcaagcggcgcgccaagcacgggaggtacttctgaaagcgctactcctgagtccggcccaggtagcccggctggctctccgacttccaccgaggaaggtagcccggctggctctccaacttctactgaagaaggttctaccagctctaccgctgaatctcctggcccaggttctactagcgaatctccgtctggcaccgcaccaggtacttcccctagcggtgaatcttctactgcaccaggtacccctggcagcggtaccgcttcttcctctccaggtagctctaccccgtctggtgctactggctctccaggttctagcccgtctgcatctaccggtaccggcccaggtagcgaaccggcaacctccggctctgaaactccaggtacttctgaaagcgctactccggaatccggcccaggtagcgaaccggctacttccggctctgaaaccccaggttccaccagctctactgcagaatctccgggcccaggttctactagctctactgcagaatctccgggtccaggtacttctcctagcggcgaatcttctaccgctccaggtagcgaaccggcaacctctggctctgaaactccaggtagcgaacctgcaacctccggctctgaaaccccaggtacttctactgaaccttctgagggcagcgcaccaggttctaccagctctaccgcagaatctcctggtccaggtacctctactccggaaagcggctctgcatctccaggttctactagcgaatctccttctggcactgcaccaggtacttctaccgaaccgtccgaaggcagcgctccaggtacctctactgaaccttccgagggcagcgctccaggtacctctaccgaaccttctgaaggtagcgcaccaggtagctctactccgtctggtgcaaccggctccccaggttctagcccgtctgcttccactggtactggcccaggtgcttccccgggcaccagctctactggttctccaggtagcgaacctgctacctccggttctgaaaccccaggtacctctgaaagcgcaactccggagtctggtccaggtagccctgcaggttctcctacctccactgaggaaggtagctctactccgtctggtgcaaccggctccccaggttctagcccgtctgcttccactggtactggcccaggtgcttccccgggcaccagctctactggttctccaggtacctctgaaagcgctactccggagtctggcccaggtacctctactgaaccgtctgagggtagcgctccaggtacttctactgaaccgtccgaaggtagcgcacca

SEQ ID NO: 116 - DNA, 2592 bp, Artificial Sequence
  Description of Artificial Sequence: Synthetic polynucleotide
ggtagcccggctggctctcctacctctactgaggaaggtacttctgaaagcgctactcctgagtctggtccaggtacctctactgaaccgtccgaaggtagcgctccaggtagcccagcaggctctccgacttccactgaggaaggtacttctactgaaccttccgaaggcagcgcaccaggtacctctactgaaccttctgagggcagcgctccaggtacttctgaaagcgctaccccggaatctggcccaggtagcgaaccggctacttctggttctgaaaccccaggtagcgaaccggctacctccggttctgaaactccaggtagcccggcaggctctccgacctctactgaggaaggtacttctgaaagcgcaaccccggagtccggcccaggtacctctaccgaaccgtctgagggcagcgcaccaggtacttctaccgaaccgtccgagggtagcgcaccaggtagcccagcaggttctcctacctccaccgaggaaggtacttctaccgaaccgtccgagggtagcgcaccaggtacctctactgaaccttctgagggcagcgctccaggtacttctgaaagcgctaccccggagtccggtccaggtacttctactgaaccgtccgaaggtagcgcaccaggtacttctgaaagcgcaacccctgaatccggtccaggtagcgaaccggctacttctggctctgagactccaggtacttctaccgaaccgtccgaaggtagcgcaccaggtacttctactgaaccgtctgaaggtagcgcaccaggtacttctgaaagcgcaaccccggaatccggcccaggtacctctgaaagcgcaaccccggagtccggcccaggtagccctgctggctctccaacctccaccgaagaaggtacctctgaaagcgcaacccctgaatccggcccaggtagcgaaccggcaacctccggttctgaaaccccaggtacctctgaaagcgctactccggagtctggcccaggtacctctactgaaccgtctgagggtagcgctccaggtacttctactgaaccgtccgaaggtagcgcaccaggtacttctaccgaaccgtccgaaggcagcgctccaggtacctctactgaaccttccgagggcagcgctccaggtacctctaccgaaccttctgaaggtagcgcaccaggtacttctaccgaaccgtccgagggtagcgcaccaggtagcccagcaggttctcctacctccaccgaggaaggtacttctaccgaaccgtccgagggtagcgcaccaggtacctctgaaagcgcaactcctgagtctggcccaggtagcgaacctgctacctccggctctgagactccaggtacctctgaaagcgcaaccccggaatctggtccaggtagcgaacctgcaacctctggctctgaaaccccaggtacctctgaaagcgctactcctgaatctggcccaggtacttctactgaaccgtccgagggcagcgcaccaggtacttctgaaagcgctactcctgagtccggcccaggtagcccggctggctctccgacttccaccgaggaaggtagcccggctggctctccaacttctactgaagaaggtagcccggcaggctctccgacctctactgaggaaggtacttctgaaagcgcaaccccggagtccggcccaggtacctctaccgaaccgtctgagggcagcgcaccaggtacctctgaaagcgcaactcctgagtctggcccaggtagcgaacctgctacctccggctctgagactccaggtacctctgaaagcgcaaccccggaatctggtccaggtagcgaacctgcaacctctggctctgaaaccccaggtacctctgaaagcgctactcctgaatctggcccaggtacttctactgaaccgtccgagggcagcgcaccaggtagccctgctggctctccaacctccaccgaagaaggtacctctgaaagcgcaacccctgaatccggcccaggtagcgaaccggcaacctccggttctgaaaccccaggtacttctgaaagcgctactcctgagtccggcccaggtagcccggctggctctccgacttccaccgaggaaggtagcccggctggctctccaacttctactgaagaaggtacttctaccgaaccttccgagggcagcgcaccaggtacttctgaaagcgctacccctgagtccggcccaggtacttctgaaagcgctactcctgaatccggtccaggtacttctgaaagcgctaccccggaatctggcccaggtagcgaaccggctacttctggttctgaaaccccaggtagcgaaccggctacctccggttctgaaactccaggtagcccagcaggctctccgacttccactgaggaaggtacttctactgaaccttccgaaggcagcgcaccaggtacctctactgaaccttctgagggcagcgctccaggtagcgaacctgcaacctctggctctgaaaccccaggtacctctgaaagcgctactcctgaatctggcccaggtacttctactgaaccgtccgagggcagcgcacca

SEQ ID NO: 117 - DNA, 2625 bp, Artificial Sequence
  Description of Artificial Sequence: Synthetic polynucleotide
  modified_base (1287)..(1298): a, c, t, g, unknown or other
  modified_base (1330)..(1337): a, c, t, g, unknown or other
ggttctaccagcgaatctccttctggcaccgctccaggtacctctcctagcggcgaatcttctaccgctccaggttctactagcgaatctccttctggcactgcaccaggttctactagcgaatccccgtctggtactgctccaggtacttctactcctgaaagcggttccgcttctccaggtacctctactccggaaagcggttctgcatctccaggttctaccagcgaatctccttctggcaccgctccaggttctactagcgaatccccgtctggtaccgcaccaggtacttctcctagcggcgaatcttctaccgcaccaggttctactagcgaatctccgtctggcactgctccaggtacttctcctagcggtgaatcttctaccgctccaggtacttcccctagcggcgaatcttctaccgctccaggttctactagctctactgcagaatctccgggcccaggtacctctcctagcggtgaatcttctaccgctccaggtacttctccgagcggtgaatcttctaccgctccaggttctactagctctactgcagaatctcctggcccaggtacctctactccggaaagcggctctgcatctccaggtacttctacccctgaaagcggttctgcatctccaggttctactagcgaatctccttctggcactgcaccaggttctaccagcgaatctccgtctggcactgcaccaggtacctctacccctgaaagcggttccgcttctccaggttctaccagctctaccgcagaatctcctggtccaggtacctctactccggaaagcggctctgcatctccaggttctactagcgaatctccttctggcactgcaccaggtacttctccgagcggtgaatcttctaccgcaccaggttctactagctctaccgctgaatctccgggcccaggtacttctccgagcggtgaatcttctactgctccaggtacctctactcctgaaagcggttctgcatctccaggttccactagctctaccgcagaatctccgggcccaggttctactagctctactgctgaatctcctggcccaggttctactagctctactgctgaatctccgggtccaggttctaccagctctactgctgaatctcctggtccaggtacctccccgagcggtgaatcttctactgcaccaggttctactagcgaatctccttctggcactgcaccaggttctaccagcgaatctccgtctggcactgcaccaggtacctctacccctgaaagcggtccnnnnnnnnnnnntgcaagcgcaagcggcgcgccaagcacgggannnnnnnntagcgaatctccttctggtaccgctccaggttctaccagcgaatccccgtctggtactgctccaggttctaccagcgaatctccttctggtactgcaccaggttctactagcgaatctccttctggtaccgctccaggttctaccagcgaatccccgtctggtactgctccaggttctaccagcgaatctccttctggtactgcaccaggtacttctactccggaaagcggttccgcatctccaggtacttctcctagcggtgaatcttctactgctccaggtacctctcctagcggcgaatcttctactgctccaggttctaccagctctactgctgaatctccgggtccaggtacttccccgagcggtgaatcttctactgcaccaggtacttctactccggaaagcggttccgcttctccaggttctaccagcgaatctccttctggcaccgctccaggttctactagcgaatccccgtctggtaccgcaccaggtacttctcctagcggcgaatcttctaccgcaccaggttctactagcgaatccccgtctggtaccgcaccaggtacttctaccccggaaagcggctctgcttctccaggtacttctaccccggaaagcggctccgcatctccaggttctactagcgaatctccttctggtaccgctccaggtacttctacccctgaaagcggctccgcttctccaggttccactagctctaccgctgaatctccgggtccaggttctaccagcgaatctccttctggcaccgctccaggttctactagcgaatccccgtctggtaccgcaccaggtacttctcctagcggcgaatcttctaccgcaccaggttctaccagctctactgctgaatctccgggtccaggtacttccccgagcggtgaatcttctactgcaccaggtacttctactccggaaagcggttccgcttctccaggtacctcccctagcggcgaatcttctactgctccaggtacctctcctagcggcgaatcttctaccgctccaggtacctcccctagcggtgaatcttctaccgcaccaggttctactagctctactgctgaatctccgggtccaggttctaccagctctactgctgaatctcctggtccaggtacctccccgagcggtgaatcttctactgcaccaggttctagcccttctgcttccaccggtaccggcccaggtagctctactccgtctggtgcaactggctctccaggtagctctactccgtctggtgcaaccggctcccca

SEQ ID NO: 118 - DNA, 2592 bp, Artificial Sequence
  Description of Artificial Sequence: Synthetic polynucleotide
ggtgcttccccgggcaccagctctactggttctccaggttctagcccgtctgcttctactggtactggtccaggttctagcccttctgcttccactggtactggtccaggtaccccgggtagcggtaccgcttcttcttctccaggtagctctactccgtctggtgctaccggctctccaggttctaacccttctgcatccaccggtaccggcccaggtgcttctccgggcaccagctctactggttctccaggtaccccgggcagcggtaccgcatcttcttctccaggtagctctactccttctggtgcaactggttctccaggtactcctggcagcggtaccgcttcttcttctccaggtgcttctcctggtactagctctactggttctccaggtgcttctccgggcactagctctactggttctccaggtaccccgggtagcggtactgcttcttcctctccaggtagctctaccccttctggtgcaaccggctctccaggtgcttctccgggcaccagctctaccggttctccaggtaccccgggtagcggtaccgcttcttcttctccaggtagctctactccgtctggtgctaccggctctccaggttctaacccttctgcatccaccggtaccggcccaggttctagcccttctgcttccaccggtactggcccaggtagctctaccccttctggtgctaccggctccccaggtagctctactccttctggtgcaactggctctccaggtgcatctccgggcactagctctactggttctccaggtgcatcccctggcactagctctactggttctccaggtgcttctcctggtaccagctctactggttctccaggtactcctggcagcggtaccgcttcttcttctccaggtgcttctcctggtactagctctactggttctccaggtgcttctccgggcactagctctactggttctccaggtgcttccccgggcactagctctaccggttctccaggttctagcccttctgcatctactggtactggcccaggtactccgggcagcggtactgcttcttcctctccaggtgcatctccgggcactagctctactggttctccaggtgcatcccctggcactagctctactggttctccaggtgcttctcctggtaccagctctactggttctccaggtagctctactccgtctggtgcaaccggttccccaggtagctctactccttctggtgctactggctccccaggtgcatcccctggcaccagctctaccggttctccaggtaccccgggcagcggtaccgcatcttcctctccaggtagctctaccccgtctggtgctaccggttccccaggtagctctaccccgtctggtgcaaccggctccccaggtagctctactccgtctggtgcaaccggctccccaggttctagcccgtctgcttccactggtactggcccaggtgcttccccgggcaccagctctactggttctccaggtgcatccccgggtaccagctctaccggttctccaggtactcctggcagcggtactgcatcttcctctccaggtgcttctccgggcaccagctctactggttctccaggtgcatctccgggcactagctctactggttctccaggtgcatcccctggcactagctctactggttctccaggtgcttctcctggtaccagctctactggttctccaggtacccctggtagcggtactgcttcttcctctccaggtagctctactccgtctggtgctaccggttctccaggtaccccgggtagcggtaccgcatcttcttctccaggtagctctaccccgtctggtgctactggttctccaggtactccgggcagcggtactgcttcttcctctccaggtagctctaccccttctggtgctactggctctccaggtagctctaccccgtctggtgctactggctccccaggttctagcccttctgcatccaccggtaccggtccaggttctagcccgtctgcatctactggtactggtccaggtgcatccccgggcactagctctaccggttctccaggtactcctggtagcggtactgcttcttcttctccaggtagctctactccttctggtgctactggttctccaggttctagcccttctgcatccaccggtaccggcccaggttctagcccgtctgcttctaccggtactggtccaggtgcttctccgggtactagctctactggttctccaggtgcatctcctggtactagctctactggttctccaggtagctctactccgtctggtgcaaccggctctccaggttctagcccttctgcatctaccggtactggtccaggtgcatcccctggtaccagctctaccggttctccaggttctagcccttctgcttctaccggtaccggtccaggtacccctggcagcggtaccgcatcttcctctccaggtagctctactccgtctggtgcaaccggttccccaggtagctctactccttctggtgctactggctccccaggtgcatcccctggcaccagctctaccggttctcca

SEQ ID NO: 119 - DNA, 2772 bp, Artificial Sequence
  Description of Artificial Sequence: Synthetic polynucleotide
atggctgaacctgctggctctccaacctccactgaggaaggtgcatccccgggcaccagctctaccggttctccaggtagctctaccccgtctggtgctaccggctctccaggtagctctaccccgtctggtgctactggctctccaggtacttctactgaaccgtctgaaggcagcgcaccaggtagcgaaccggctacttccggttctgaaaccccaggtagcccagcaggttctccaacttctactgaagaaggttctaccagctctaccgcagaatctcctggtccaggtacctctactccggaaagcggctctgcatctccaggttctactagcgaatctccttctggcactgcaccaggttctactagcgaatccccgtctggtactgctccaggtacttctactcctgaaagcggttccgcttctccaggtacctctactccggaaagcggttctgcatctccaggtagcgaaccggcaacctccggctctgaaaccccaggtacctctgaaagcgctactcctgaatccggcccaggtagcccggcaggttctccgacttccactgaggaaggtacctctactgaaccttctgagggcagcgctccaggtacttctgaaagcgctaccccggagtccggtccaggtacttctactgaaccgtccgaaggtagcgcaccaggtacttctaccgaaccgtccgagggtagcgcaccaggtagcccagcaggttctcctacctccaccgaggaaggtacttctaccgaaccgtccgagggtagcgcaccaggtacttctaccgaaccttccgagggcagcgcaccaggtacttctgaaagcgctacccctgagtccggcccaggtacttctgaaagcgctactcctgaatccggtccaggtacctctactgaaccttccgaaggcagcgctccaggtacctctaccgaaccgtccgagggcagcgcaccaggtacttctgaaagcgcaacccctgaatccggtccaggtacttctactgaaccttccgaaggtagcgctccaggtagcgaacctgctacttctggttctgaaaccccaggtagcccggctggctctccgacctccaccgaggaaggtagctctaccccgtctggtgctactggttctccaggtactccgggcagcggtactgcttcttcctctccaggtagctctaccccttctggtgctactggctctccaggtacctctaccgaaccgtccgagggtagcgcaccaggtacctctactgaaccgtctgagggtagcgctccaggtagcgaaccggcaacctccggttctgaaactccaggtagccctgctggctctccgacttctactgaggaaggtagcccggctggttctccgacttctactgaggaaggtacttctaccgaaccttccgaaggtagcgctccaggtgcaagcgcaagcggcgcgccaagcacgggaggtacttctgaaagcgctactcctgagtccggcccaggtagcccggctggctctccgacttccaccgaggaaggtagcccggctggctctccaacttctactgaagaaggttctaccagctctaccgctgaatctcctggcccaggttctactagcgaatctccgtctggcaccgcaccaggtacttcccctagcggtgaatcttctactgcaccaggtacccctggcagcggtaccgcttcttcctctccaggtagctctaccccgtctggtgctactggctctccaggttctagcccgtctgcatctaccggtaccggcccaggtagcgaaccggcaacctccggctctgaaactccaggtacttctgaaagcgctactccggaatccggcccaggtagcgaaccggctacttccggctctgaaaccccaggttccaccagctctactgcagaatctccgggcccaggttctactagctctactgcagaatctccgggtccaggtacttctcctagcggcgaatcttctaccgctccaggtagcgaaccggcaacctctggctctgaaactccaggtagcgaacctgcaacctccggctctgaaaccccaggtacttctactgaaccttctgagggcagcgcaccaggttctaccagctctaccgcagaatctcctggtccaggtacctctactccggaaagcggctctgcatctccaggttctactagcgaatctccttctggcactgcaccaggtacttctaccgaaccgtccgaaggcagcgctccaggtacctctactgaaccttccgagggcagcgctccaggtacctctaccgaaccttctgaaggtagcgcaccaggtagctctactccgtctggtgcaaccggctccccaggttctagcccgtctgcttccactggtactggcccaggtgcttccccgggcaccagctctactggttctccaggtagcgaacctgctacctccggttctgaaaccccaggtacctctgaaagcgcaactccggagtctggtccaggtagccctgcaggttctcctacctccactgaggaaggtagctctactccgtctggtgcaaccggctccccaggttctagcccgtctgcttccactggtactggcccaggtgcttccccgggcaccagctctactggttctccaggtacctctgaaagcgctactccggagtctggcccaggtacctctactgaaccgtctgagggtagcgctccaggtacttctactgaaccgtccgaaggtagcgcacca

SEQ ID NO: 120 - DNA, 2739 bp, Artificial Sequence
  Description of Artificial Sequence: Synthetic polynucleotide
atggctgaacctgctggctctccaacctccactgaggaaggtaccccgggtagcggtactgcttcttcctctccaggtagctctaccccttctggtgcaaccggctctccaggtgcttctccgggcaccagctctaccggttctccaggtagcccggctggctctcctacctctactgaggaaggtacttctgaaagcgctactcctgagtctggtccaggtacctctactgaaccgtccgaaggtagcgctccaggtagcccagcaggctctccgacttccactgaggaaggtacttctactgaaccttccgaaggcagcgcaccaggtacctctactgaaccttctgagggcagcgctccaggtacttctgaaagcgctaccccggaatctggcccaggtagcgaaccggctacttctggttctgaaaccccaggtagcgaaccggctacctccggttctgaaactccaggtagcccggcaggctctccgacctctactgaggaaggtacttctgaaagcgcaaccccggagtccggcccaggtacctctaccgaaccgtctgagggcagcgcaccaggtacttctaccgaaccgtccgagggtagcgcaccaggtagcccagcaggttctcctacctccaccgaggaaggtacttctaccgaaccgtccgagggtagcgcaccaggtacctctactgaaccttctgagggcagcgctccaggtacttctgaaagcgctaccccggagtccggtccaggtacttctactgaaccgtccgaaggtagcgcaccaggtacttctgaaagcgcaacccctgaatccggtccaggtagcgaaccggctacttctggctctgagactccaggtacttctaccgaaccgtccgaaggtagcgcaccaggtacttctactgaaccgtctgaaggtagcgcaccaggtacttctgaaagcgcaaccccggaatccggcccaggtacctctgaaagcgcaaccccggagtccggcccaggtagccctgctggctctccaacctccaccgaagaaggtacctctgaaagcgcaacccctgaatccggcccaggtagcgaaccggcaacctccggttctgaaaccccaggtacctctgaaagcgctactccggagtctggcccaggtacctctactgaaccgtctgagggtagcgctccaggtacttctactgaaccgtccgaaggtagcgcaccaggtacttctaccgaaccgtccgaaggcagcgctccaggtacctctactgaaccttccgagggcagcgctccaggtacctctaccgaaccttctgaaggtagcgcaccaggtacttctaccgaaccgtccgagggtagcgcaccaggtagcccagcaggttctcctacctccaccgaggaaggtacttctaccgaaccgtccgagggtagcgcaccaggtacctctgaaagcgcaactcctgagtctggcccaggtagcgaacctgctacctccggctctgagactccaggtacctctgaaagcgcaaccccggaatctggtccaggtagcgaacctgcaacctctggctctgaaaccccaggtacctctgaaagcgctactcctgaatctggcccaggtacttctactgaaccgtccgagggcagcgcaccaggtacttctgaaagcgctactcctgagtccggcccaggtagcccggctggctctccgacttccaccgaggaaggtagcccggctggctctccaacttctactgaagaaggtagcccggcaggctctccgacctctactgaggaaggtacttctgaaagcgcaaccccggagtccggcccaggtacctctaccgaaccgtctgagggcagcgcaccaggtacctctgaaagcgcaactcctgagtctggcccaggtagcgaacctgctacctccggctctgagactccaggtacctctgaaagcgcaaccccggaatctggtccaggtagcgaacctgcaacctctggctctgaaaccccaggtacctctgaaagcgctactcctgaatctggcccaggtacttctactgaaccgtccgagggcagcgcaccaggtagccctgctggctctccaacctccaccgaagaaggtacctctgaaagcgcaacccctgaatccggcccaggtagcgaaccggcaacctccggttctgaaaccccaggtacttctgaaagcgctactcctgagtccggcccaggtagcccggctggctctccgacttccaccgaggaaggtagcccggctggctctccaacttctactgaagaaggtacttctaccgaaccttccgagggcagcgcaccaggtacttctgaaagcgctacccctgagtccggcccaggtacttctgaaagcgctactcctgaatccggtccaggtacttctgaaagcgctaccccggaatctggcccaggtagcgaaccggctacttctggttctgaaaccccaggtagcgaaccggctacctccggttctgaaactccaggtagcccagcaggctctccgacttccactgaggaaggtacttctactgaaccttccgaaggcagcgcaccaggtacctctactgaaccttctgagggcagcgctccaggtagcgaacctgcaacctctggctctgaaaccccaggtacctctgaaagcgctactcctgaatctggcccaggtacttctactgaaccgtccgagggcagcgcacca

SEQ ID NO: 121 - DNA, 3954 bp, Artificial Sequence
  Description of Artificial Sequence: Synthetic polynucleotide
ggtacttctactgaaccgtctgaaggcagcgcaccaggtagcgaaccggctacttccggttctgaaaccccaggtagcccagcaggttctccaacttctactgaagaaggttctaccagctctaccgcagaatctcctggtccaggtacctctactccggaaagcggctctgcatctccaggttctactagcgaatctccttctggcactgcaccaggttctactagcgaatccccgtctggtactgctccaggtacttctactcctgaaagcggttccgcttctccaggtacctctactccggaaagcggttctgcatctccaggtagcgaaccggcaacctccggctctgaaaccccaggtacctctgaaagcgctactcctgaatccggcccaggtagcccggcaggttctccgacttccactgaggaaggtacctctactgaaccttctgagggcagcgctccaggtacttctgaaagcgctaccccggagtccggtccaggtacttctactgaaccgtccgaaggtagcgcaccaggtacttctaccgaaccgtccgagggtagcgcaccaggtagcccagcaggttctcctacctccaccgaggaaggtacttctaccgaaccgtccgagggtagcgcaccaggtacttctaccgaaccttccgagggcagcgcaccaggtacttctgaaagcgctacccctgagtccggcccaggtacttctgaaagcgctactcctgaatccggtccaggtacctctactgaaccttccgaaggcagcgctccaggtacctctaccgaaccgtccgagggcagcgcaccaggtacttctgaaagcgcaacccctgaatccggtccaggtacttctactgaaccttccgaaggtagcgctccaggtagcgaacctgctacttctggttctgaaaccccaggtagcccggctggctctccgacctccaccgaggaaggtagctctaccccgtctggtgctactggttctccaggtactccgggcagcggtactgcttcttcctctccaggtagctctaccccttctggtgctactggctctccaggtacctctaccgaaccgtccgagggtagcgcaccaggtacctctactgaaccgtctgagggtagcgctccaggtagcgaaccggcaacctccggttctgaaactccaggtagccctgctggctctccgacttctactgaggaaggtagcccggctggttctccgacttctactgaggaaggtacttctaccgaaccttccgaaggtagcgctccaggtccagaaccaacggggccggccccaagcggaggtagcgaaccggcaacctccggctctgaaaccccaggtacctctgaaagcgctactcctgaatccggcccaggtagcccggcaggttctccgacttccactgaggaaggtacttctgaaagcgctactcctgagtccggcccaggtagcccggctggctctccgacttccaccgaggaaggtagcccggctggctctccaacttctactgaagaaggtacttctgaaagcgctactcctgagtccggcccaggtagcccggctggctctccgacttccaccgaggaaggtagcccggctggctctccaacttctactgaagaaggttctaccagctctaccgctgaatctcctggcccaggttctactagcgaatctccgtctggcaccgcaccaggtacttcccctagcggtgaatcttctactgcaccaggttctaccagcgaatctccttctggcaccgctccaggttctactagcgaatccccgtctggtaccgcaccaggtacttctcctagcggcgaatcttctaccgcaccaggtacttctaccgaaccttccgagggcagcgcaccaggtacttctgaaagcgctacccctgagtccggcccaggtacttctgaaagcgctactcctgaatccggtccaggtagcgaaccggcaacctctggctctgaaaccccaggtacctctgaaagcgctactccggaatctggtccaggtacttctgaaagcgctactccggaatccggtccaggtacctctactgaaccttctgagggcagcgctccaggtacttctgaaagcgctaccccggagtccggtccaggtacttctactgaaccgtccgaaggtagcgcaccaggtacctcccctagcggcgaatcttctactgctccaggtacctctcctagcggcgaatcttctaccgctccaggtacctcccctagcggtgaatcttctaccgcaccaggtacttctaccgaaccgtccgagggtagcgcaccaggtagcccagcaggttctcctacctccaccgaggaaggtacttctaccgaaccgtccgagggtagcgcaccaggttctagcccttctgcttccaccggtaccggcccaggtagctctactccgtctggtgcaactggctctccaggtagctctactccgtctggtgcaaccggctccccaggtagctctaccccgtctggtgctaccggctctccaggtagctctaccccgtctggtgcaaccggctccccaggtgcatccccgggtactagctctaccggttctccaggtgcaagcgcaagcggcgcgccaagcacgggaggtacttctccgagcggtgaatcttctaccgcaccaggttctactagctctaccgctgaatctccgggcccaggtacttctccgagcggtgaatcttctactgctccaggtacctctgaaagcgctactccggagtctggcccaggtacctctactgaaccgtctgagggtagcgctccaggtacttctactgaaccgtccgaaggtagcgcaccaggttctagcccttctgcatctactggtactggcccaggtagctctactccttctggtgctaccggctctccaggtgcttctccgggtactagctctaccggttctccaggtacttctactccggaaagcggttccgcatctccaggtacttctcctagcggtgaatcttctactgctccaggtacctctcctagcggcgaatcttctactgctccaggtacttctgaaagcgcaacccctgaatccggtccaggtagcgaaccggctacttctggctctgagactccaggtacttctaccgaaccgtccgaaggtagcgcaccaggttctaccagcgaatccccttctggtactgctccaggttctaccagcgaatccccttctggcaccgcaccaggtacttctacccctgaaagcggctccgcttctccaggtagcccggcaggctctccgacctctactgaggaaggtacttctgaaagcgcaaccccggagtccggcccaggtacctctaccgaaccgtctgagggcagcgcaccaggtagccctgctggctctccaacctccaccgaagaaggtacctctgaaagcgcaacccctgaatccggcccaggtagcgaaccggcaacctccggttctgaaaccccaggtagctctaccccgtctggtgctaccggttccccaggtgcttctcctggtactagctctaccggttctccaggtagctctaccccgtctggtgctactggctctccaggttctactagcgaatccccgtctggtactgctccaggtacttcccctagcggtgaatcttctactgctccaggttctaccagctctaccgcagaatctccgggtccaggtagctctaccccttctggtgcaaccggctctccaggtgcatccccgggtaccagctctaccggttctccaggtactccgggtagcggtaccgcttcttcctctccaggtagccctgctggctctccgacttctactgaggaaggtagcccggctggttctccgacttctactgaggaaggtacttctaccgaaccttccgaaggtagcgctcca

SEQ ID NO: 122 - DNA, 2592 bp, Artificial Sequence
  Description of Artificial Sequence: Synthetic polynucleotide
ggtacttccaccgaaccatccgaaccaggtagcgcaggtacttccaccgaaccatccgaacctggcagcgcaggtagcgaaccggcaacctctggtactgaaccatcaggtagcggcgcatccgagcctacctctactgaaccaggtagcgaaccggctacctccggtactgagccatcaggtagcgaaccggcaacttccggtactgaaccatcaggtagcgaaccggcaacttccggcactgaaccatcaggtagcggtgcatctgagccgacctctactgaaccaggtacttctactgaaccatctgagccgggcagcgcaggtagcgaaccagctacttctggcactgaaccatcaggtacttctactgaaccatccgaaccaggtagcgcaggtagcgaacctgctacctctggtactgagccatcaggtagcgaaccggctacctctggtactgaaccatcaggtacttctaccgaaccatccgagcctggtagcgcaggtacttctaccgaaccatccgagccaggcagcgcaggtagcgaaccggcaacctctggcactgagccatcaggtagcgaaccagcaacttctggtactgaaccatcaggtactagcgagccatctacttccgaaccaggtgcaggtagcggcgcatccgaacctacttccactgaaccaggtactagcgagccatccacctctgaaccaggtgcaggtagcgaaccggcaacttccggcactgaaccatcaggtagcgaaccggctacctctggtactgaaccatcaggtacttctaccgaaccatccgagcctggtagcgcaggtacttctaccgaaccatccgagccaggcagcgcaggtagcggtgcatccgagccgacctctactgaaccaggtagcgaaccagcaacttctggcactgagccatcaggtagcgaaccagctacctctggtactgaaccatcaggtagcgaaccggctacttccggcactgaaccatcaggtagcgaaccagcaacctccggtactgaaccatcaggtacttccactgaaccatccgaaccgggtagcgcaggtagcgaaccggcaacttccggcactgaaccatcaggtagcggtgcatctgagccgacctctactgaaccaggtacttctactgaaccatctgagccgggcagcgcaggtagcgaacctgcaacctccggcactgagccatcaggtagcggcgcatctgaaccaacctctactgaaccaggtacttccaccgaaccatctgagccaggcagcgcaggtagcggcgcatctgaaccaacctctactgaaccaggtagcgaaccagcaacttctggtactgaaccatcaggtagcggcgcatctgagcctacttccactgaaccaggtagcgaaccggcaacttccggcactgaaccatcaggtagcggtgcatctgagccgacctctactgaaccaggtacttctactgaaccatctgagccgggcagcgcaggtagcgaaccggcaacttccggcactgaaccatcaggtagcggtgcatctgagccgacctctactgaaccaggtacttctactgaaccatctgagccgggcagcgcaggtagcgaaccagctacttctggcactgaaccatcaggtacttctactgaaccatccgaaccaggtagcgcaggtagcgaacctgctacctctggtactgagccatcaggtacttctactgaaccatccgagccgggtagcgcaggtacttccactgaaccatctgaacctggtagcgcaggtacttccactgaaccatccgaaccaggtagcgcaggtacttctactgaaccatccgagccgggtagcgcaggtacttccactgaaccatctgaacctggtagcgcaggtacttccactgaaccatccgaaccaggtagcgcaggtactagcgaaccatccacctccgaaccaggcgcaggtagcggtgcatctgaaccgacttctactgaaccaggtacttccactgaaccatctgagccaggtagcgcaggtacttccaccgaaccatccgaaccaggtagcgcaggtacttccaccgaaccatccgaacctggcagcgcaggtagcgaaccggcaacctctggtactgaaccatcaggtagcggtgcatccgagccgacctctactgaaccaggtagcgaaccagcaacttctggcactgagccatcaggtagcgaaccagctacctctggtactgaaccatcaggtagcgaaccggcaacctctggcactgagccatcaggtagcgaaccagcaacttctggtactgaaccatcaggtactagcgagccatctacttccgaaccaggtgcaggtagcgaacctgcaacctccggcactgagccatcaggtagcggcgcatctgaaccaacctctactgaaccaggtacttccaccgaaccatctgagccaggcagcgcaggtagcgaacctgcaacctccggcactgagccatcaggtagcggcgcatctgaaccaacctctactgaaccaggtacttccaccgaaccatctgagccaggcagcgca

SEQ ID NO: 123 - DNA, 2592 bp, Artificial Sequence
  Description of Artificial Sequence: Synthetic polynucleotide
ggtagcgaaactgctacttccggctctgagactgcaggtactagtgaatccgcaactagcgaatctggcgcaggtagcactgcaggctctgagacttccactgaagcaggtactagcgagtccgcaaccagcgaatccggcgcaggtagcgaaactgctacctctggctccgagactgcaggtagcgaaactgcaacctctggctctgaaactgcaggtacttccactgaagcaagtgaaggctccgcatcaggtacttccaccgaagcaagcgaaggctccgcatcaggtactagtgagtccgcaactagcgaatccggtgcaggtagcgaaaccgctacctctggttccgaaactgcaggtacttctaccgaggctagcgaaggttctgcatcaggtagcactgctggttccgagacttctactgaagcaggtactagcgaatctgctactagcgaatccggcgcaggtactagcgaatccgctaccagcgaatccggcgcaggtagcgaaactgcaacctctggttccgagactgcaggtactagcgagtccgctactagcgaatctggcgcaggtacttccactgaagctagtgaaggttctgcatcaggtagcgaaactgctacttctggttccgaaactgcaggtagcgaaaccgctacctctggttccgaaactgcaggtacttctaccgaggctagcgaaggttctgcatcaggtagcactgctggttccgagacttctactgaagcaggtactagcgagtccgctactagcgaatctggcgcaggtacttccactgaagctagtgaaggttctgcatcaggtagcgaaactgctacttctggttccgaaactgcaggtagcactgctggctccgagacttctaccgaagcaggtagcactgcaggttccgaaacttccactgaagcaggtagcgaaactgctacctctggctctgagactgcaggtactagcgaatctgctactagcgaatccggcgcaggtactagcgaatccgctaccagcgaatccggcgcaggtagcgaaactgcaacctctggttccgagactgcaggtactagcgaatctgctactagcgaatccggcgcaggtactagcgaatccgctaccagcgaatccggcgcaggtagcgaaactgcaacctctggttccgagactgcaggtagcgaaaccgctacctctggttccgaaactgcaggtacttctaccgaggctagcgaaggttctgcatcaggtagcactgctggttccgagacttctactgaagcaggtagcgaaactgctacttccggctctgagactgcaggtactagtgaatccgcaactagcgaatctggcgcaggtagcactgcaggctctgagacttccactgaagcaggtagcactgctggttccgaaacctctaccgaagcaggtagcactgcaggttctgaaacctccactgaagcaggtacttccactgaggctagtgaaggctctgcatcaggtagcactgctggttccgaaacctctaccgaagcaggtagcactgcaggttctgaaacctccactgaagcaggtacttccactgaggctagtgaaggctctgcatcaggtagcactgcaggttctgagacttccaccgaagcaggtagcgaaactgctacttctggttccgaaactgcaggtacttccactgaagctagtgaaggttccgcatcaggtactagtgagtccgcaaccagcgaatccggcgcaggtagcgaaaccgcaacctccggttctgaaactgcaggtactagcgaatccgcaaccagcgaatctggcgcaggtactagtgagtccgcaaccagcgaatccggcgcaggtagcgaaaccgcaacctccggttctgaaactgcaggtactagcgaatccgcaaccagcgaatctggcgcaggtagcgaaactgctacttccggctctgagactgcaggtacttccaccgaagcaagcgaaggttccgcatcaggtacttccaccgaggctagtgaaggctctgcatcaggtagcactgctggctccgagacttctaccgaagcaggtagcactgcaggttccgaaacttccactgaagcaggtagcgaaactgctacctctggctctgagactgcaggtactagcgaatctgctactagcgaatccggcgcaggtactagcgaatccgctaccagcgaatccggcgcaggtagcgaaactgcaacctctggttccgagactgcaggtagcgaaactgctacttccggctccgagactgcaggtagcgaaactgctacttctggctccgaaactgcaggtacttctactgaggctagtgaaggttccgcatcaggtactagcgagtccgcaaccagcgaatccggcgcaggtagcgaaactgctacctctggctccgagactgcaggtagcgaaactgcaacctctggctctgaaactgcaggtactagcgaatctgctactagcgaatccggcgcaggtactagcgaatccgctaccagcgaatccggcgcaggtagcgaaactgcaacctctggttccgagactgca

SEQ ID NO: 124 - DNA, 37 bp, Artificial Sequence
  Description of Artificial Sequence: Synthetic oligonucleotide
aggtgcaagcgcaagcggcgcgccaagcacgggaggt

SEQ ID NO: 125 - DNA, 37 bp, Artificial Sequence
  Description of Artificial Sequence: Synthetic oligonucleotide
aggtccagaaccaacggggccggccccaagcggaggt

SEQ ID NO: 126 - protein, 6 aa, Artificial Sequence
  Description of Artificial Sequence: Synthetic peptide
HHHHHH

SEQ ID NO: 127 - protein, 4 aa, Artificial Sequence
  Description of Artificial Sequence: Synthetic peptide
DDDK

SEQ ID NO: 128 - protein, 4 aa, Artificial Sequence
  Description of Artificial Sequence: Synthetic peptide
IDGR

SEQ ID NO: 129 - protein, 6 aa, Artificial Sequence
  Description of Artificial Sequence: Synthetic peptide
LVPRGS

SEQ ID NO: 130 - protein, 8 aa, Artificial Sequence
  Description of Artificial Sequence: Synthetic peptide
LEVLFQGP

SEQ ID NO: 131 - protein, 7 aa, Artificial Sequence
  Description of Artificial Sequence: Synthetic peptide
EQLYFQG

SEQ ID NO: 132 - protein, 7 aa, Artificial Sequence
  Description of Artificial Sequence: Synthetic peptide
ETLFQGP

SEQ ID NO: 133 - protein, 5 aa, Artificial Sequence
  Description of Artificial Sequence: Synthetic peptide
LPETG

SEQ ID NO: 134 - DNA, 147 bp, Artificial Sequence
  Description of Artificial Sequence: Synthetic polynucleotide
atggctgaacctgctggctctccaacctccactgaggaaggtaccccgggtagcggtactgcttcttcctctccaggtagctctaccccttctggtgcaaccggctctccaggtgcttctccgggcaccagctctaccggttctcca

SEQ ID NO: 135 - DNA, 147 bp, Artificial Sequence
  Description of Artificial Sequence: Synthetic polynucleotide
atggctgaacctgctggctctccaacctccactgaggaaggtgcatccccgggcaccagctctaccggttctccaggtagctctaccccgtctggtgctaccggctctccaggtagctctaccccgtctggtgctactggctctcca

SEQ ID NO: 136 - protein, 12 aa, Artificial Sequence
  Description of Artificial Sequence: Synthetic peptide
GESPGGSSGSES

SEQ ID NO: 137 - protein, 12 aa, Artificial Sequence
  Description of Artificial Sequence: Synthetic peptide
GSEGSSGPGESS

SEQ ID NO: 138 - protein, 12 aa, Artificial Sequence
  Description of Artificial Sequence: Synthetic peptide
GSSESGSSEGGP

SEQ ID NO: 139 - protein, 12 aa, Artificial Sequence
  Description of Artificial Sequence: Synthetic peptide
GSGGEPSESGSS

SEQ ID NO: 140 - DNA, 36 bp, Artificial Sequence
  Description of Artificial Sequence: Synthetic oligonucleotide
aggtgaatctccdggtggytcyagcggttcygartc

SEQ ID NO: 141 - DNA, 36 bp, Artificial Sequence
  Description of Artificial Sequence: Synthetic oligonucleotide
acctgaytcrgaaccgctrgarccacchggagattc

SEQ ID NO: 142 - DNA, 36 bp, Artificial Sequence
  Description of Artificial Sequence: Synthetic oligonucleotide
aggtagcgaaggttcttcyggtccdggygartcytc

SEQ ID NO: 143 - DNA, 36 bp, Artificial Sequence
  Description of Artificial Sequence: Synthetic oligonucleotide
acctgargaytcrcchggaccrgaagaaccttcgct

SEQ ID NO: 144 - DNA, 36 bp, Artificial Sequence
  Description of Artificial Sequence: Synthetic oligonucleotide
aggttcytcygaaagcggttcttcygarggyggtcc

SEQ ID NO: 145 - DNA, 36 bp, Artificial Sequence
  Description of Artificial Sequence: Synthetic oligonucleotide
acctggaccrccytcrgaagaaccgctttcrgarga

SEQ ID NO: 146 - DNA, 36 bp, Artificial Sequence
  Description of Artificial Sequence: Synthetic oligonucleotide
aggttcyggtggygaaccdtcygartctggtagctc

SEQ ID NO: 147 - DNA, 24 bp, Artificial Sequence
  Description of Artificial Sequence: Synthetic oligonucleotide
aggttcgtcttcactcgagggtac

SEQ ID NO: 148 - DNA, 16 bp, Artificial Sequence
  Description of Artificial Sequence: Synthetic oligonucleotide
cctcgagtgaagacga

SEQ ID NO: 149 - protein, 36 aa, Artificial Sequence
  Description of Artificial Sequence: Synthetic polypeptide
GSGGEPSESGSSGESPGGSSGSESGESPGGSSGSES

SEQ ID NO: 150 - DNA, 108 bp, Artificial Sequence
  Description of Artificial Sequence: Synthetic polynucleotide
ggttctggtggcgaaccgtccgagtctggtagctcaggtgaatctccgggtggctctagcggttccgagtcaggtgaatctcctggtggttccagcggttccgagtca

SEQ ID NO: 151 - protein, 36 aa, Artificial Sequence
  Description of Artificial Sequence: Synthetic polypeptide
GSEGSSGPGESSGESPGGSSGSESGSSESGSSEGGP

SEQ ID NO: 152 - DNA, 108 bp, Artificial Sequence
  Description of Artificial Sequence: Synthetic polynucleotide
ggtagcgaaggttcttctggtcctggcgagtcttcaggtgaatctcctggtggttccagcggttctgaatcaggttcctccgaaagcggttcttccgagggcggtcca

SEQ ID NO: 153 - protein, 36 aa, Artificial Sequence
  Description of Artificial Sequence: Synthetic polypeptide
GSSESGSSEGGPGSSESGSSEGGPGESPGGSSGSES

SEQ ID NO: 154 - DNA, 108 bp, Artificial Sequence
  Description of Artificial Sequence: Synthetic polynucleotide
ggttcctctgaaagcggttcttccgaaggtggtccaggttcctctgaaagcggttcttctgagggtggtccaggtgaatctccgggtggctccagcggttccgagtca

SEQ ID NO: 155 - protein, 36 aa, Artificial Sequence
  Description of Artificial Sequence: Synthetic polypeptide
GSGGEPSESGSSGSSESGSSEGGPGSGGEPSESGSS

SEQ ID NO: 156 - DNA, 108 bp, Artificial Sequence
  Description of Artificial Sequence: Synthetic polynucleotide
ggttccggtggcgaaccgtctgaatctggtagctcaggttcttctgaaagcggttcttccgagggtggtccaggttctggtggtgaaccttccgagtctggtagctca

SEQ ID NO: 157 - protein, 36 aa, Artificial Sequence
  Description of Artificial Sequence: Synthetic polypeptide
GSSESGSSEGGPGSEGSSGPGESSGSEGSSGPGESS

SEQ ID NO: 158 - DNA, 108 bp, Artificial Sequence
  Description of Artificial Sequence: Synthetic polynucleotide
ggttcttccgaaagcggttcttctgagggtggtccaggtagcgaaggttcttccggtccaggtgagtcttcaggtagcgaaggttcttctggtcctggtgaatcttca

SEQ ID NO: 159 - protein, 36 aa, Artificial Sequence
  Description of Artificial Sequence: Synthetic polypeptide
GSSESGSSEGGPGESPGGSSGSESGSEGSSGPGESS

SEQ ID NO: 160 - DNA, 108 bp, Artificial Sequence
  Description of Artificial Sequence: Synthetic polynucleotide
ggttcctctgaaagcggttcttccgagggtggtccaggtgaatctccaggtggttccagcggttctgagtcaggtagcgaaggttcttctggtccaggtgaatcctca

SEQ ID NO: 161 - protein, 36 aa, Artificial Sequence
  Description of Artificial Sequence: Synthetic polypeptide
GSGGEPSESGSSGSGGEPSESGSSGSEGSSGPGESS

SEQ ID NO: 162 - DNA, 108 bp, Artificial Sequence
  Description of Artificial Sequence: Synthetic polynucleotide
ggttctggtggtgaaccgtctgagtctggtagctcaggttccggtggcgaaccatccgaatctggtagctcaggtagcgaaggttcttccggtccaggtgagtcttca

SEQ ID NO: 163 - protein, 36 aa, Artificial Sequence
  Description of Artificial Sequence: Synthetic polypeptide
GSSESGSSEGGPGSEGSSGPGESSGESPGGSSGSES

SEQ ID NO: 164 - DNA, 108 bp, Artificial Sequence
  Description of Artificial Sequence: Synthetic polynucleotide
ggttcttccgaaagcggttcttccgaaggcggtccaggtagcgaaggttcttctggtccaggcgaatcttcaggtgaatctcctggtggctccagcggttctgagtca

SEQ ID NO: 165 - protein, 36 aa, Artificial Sequence
  Description of Artificial Sequence: Synthetic polypeptide
GSSESGSSEGGPGSSESGSSEGGPGSSESGSSEGGP

SEQ ID NO: 166 - DNA, 108 bp, Artificial Sequence
  Description of Artificial Sequence: Synthetic polynucleotide
ggttcctccgaaagcggttcttctgagggcggtccaggttcctccgaaagcggttcttccgagggcggtccaggttcttctgaaagcggttcttccgagggcggtcca

SEQ ID NO: 167 - protein, 36 aa, Artificial Sequence
  Description of Artificial Sequence: Synthetic polypeptide
GSGGEPSESGSSGSEGSSGPGESSGSSESGSSEGGP

SEQ ID NO: 168 - DNA, 108 bp, Artificial Sequence
  Description of Artificial Sequence: Synthetic polynucleotide
ggttccggtggcgaaccgtccgaatctggtagctcaggtagcgaaggttcttctggtccaggcgaatcttcaggttcctctgaaagcggttcttctgagggcggtcca

SEQ ID NO: 169 - protein, 36 aa, Artificial Sequence; identical to SEQ ID NO: 155
  Description of Artificial Sequence: Synthetic polypeptide

SEQ ID NO: 170 - DNA, 108 bp, Artificial Sequence
  Description of Artificial Sequence: Synthetic polynucleotide
ggttctggtggtgaaccgtccgaatctggtagctcaggttcttccgaaagcggttcttctgaaggtggtccaggttccggtggcgaaccttctgaatctggtagctca

SEQ ID NO: 171 - protein, 36 aa, Artificial Sequence
  Description of Artificial Sequence: Synthetic polypeptide
GSGGEPSESGSSGSSESGSSEGGPGESPGGSSGSES

SEQ ID NO: 172 - DNA, 108 bp, Artificial Sequence
  Description of Artificial Sequence: Synthetic polynucleotide
ggttctggtggcgaaccgtccgaatctggtagctcaggttcctccgaaagcggttcttctgaaggtggtccaggtgaatctccaggtggttctagcggttctgaatca

SEQ ID NO: 173 - protein, 36 aa, Artificial Sequence
  Description of Artificial Sequence: Synthetic polypeptide
GSGGEPSESGSSGESPGGSSGSESGSEGSSGPGESS

SEQ ID NO: 174 - DNA, 108 bp, Artificial Sequence
  Description of Artificial Sequence: Synthetic polynucleotide
ggttctggtggcgaaccgtctgagtctggtagctcaggtgaatctcctggtggctccagcggttctgaatcaggtagcgaaggttcttctggtcctggtgaatcttca

SEQ ID NO: 175 - protein, 36 aa, Artificial Sequence
  Description of Artificial Sequence: Synthetic polypeptide
GSGGEPSESGSSGESPGGSSGSESGSGGEPSESGSS

SEQ ID NO: 176 - DNA, 108 bp, Artificial Sequence
  Description of Artificial Sequence: Synthetic polynucleotide
ggttccggtggcgaaccttccgaatctggtagctcaggtgaatctccgggtggttctagcggttctgagtcaggttctggtggtgaaccttccgagtctggtagctca

SEQ ID NO: 177 - protein, 36 aa, Artificial Sequence; identical to SEQ ID NO: 165
  Description of Artificial Sequence: Synthetic polypeptide

SEQ ID NO: 178 - DNA, 108 bp, Artificial Sequence
  Description of Artificial Sequence: Synthetic polynucleotide
ggttcctctgaaagcggttcttctgagggcggtccaggttcttccgaaagcggttcttccgagggcggtccaggttcttccgaaagcggttcttctgaaggcggtcca

SEQ ID NO: 179 - protein, 36 aa, Artificial Sequence
  Description of Artificial Sequence: Synthetic polypeptide
GESPGGSSGSESGSEGSSGPGESSGSEGSSGPGESS

SEQ ID NO: 180 - DNA, 108 bp, Artificial Sequence
  Description of Artificial Sequence: Synthetic polynucleotide
ggtgaatctccgggtggctccagcggttctgagtcaggtagcgaaggttcttccggtccgggtgagtcctcaggtagcgaaggttcttccggtcctggtgagtcttca

SEQ ID NO: 181 - protein, 36 aa, Artificial Sequence
  Description of Artificial Sequence: Synthetic polypeptide
GSGGEPSESGSSGSGGEPSESGSSGSSESGSSEGGP

SEQ ID NO: 182 - DNA, 108 bp, Artificial Sequence
  Description of Artificial Sequence: Synthetic polynucleotide
ggttctggtggcgaaccttccgaatctggtagctcaggttccggtggtgaaccttctgaatctggtagctcaggttcttctgaaagcggttcttccgagggcggtcca

SEQ ID NO: 183 - protein, 36 aa, Artificial Sequence
  Description of Artificial Sequence: Synthetic polypeptide
GSGGEPSESGSSGSGGEPSESGSSGSGGEPSESGSS

SEQ ID NO: 184 - DNA, 108 bp, Artificial Sequence
  Description of Artificial Sequence: Synthetic polynucleotide
ggttccggtggtgaaccttctgaatctggtagctcaggttccggtggcgaaccatccgagtctggtagctcaggttccggtggtgaaccatccgagtctggtagctca

SEQ ID NO: 185 - protein, 36 aa, Artificial Sequence
  Description of Artificial Sequence: Synthetic polypeptide
GSGGEPSESGSSGSSESGSSEGGPGSEGSSGPGESS

SEQ ID NO: 186 - DNA, 108 bp, Artificial Sequence
  Description of Artificial Sequence: Synthetic polynucleotide
ggttccggtggcgaaccttctgaatctggtagctcaggttcctccgaaagcggttcttctgagggcggtccaggtagcgaaggttcttctggtccgggcgagtcttca

SEQ ID NO: 187 - protein, 36 aa, Artificial Sequence
  Description of Artificial Sequence: Synthetic polypeptide
GSGGEPSESGSSGSEGSSGPGESSGSGGEPSESGSS

SEQ ID NO: 188 - DNA, 108 bp, Artificial Sequence
  Description of Artificial Sequence: Synthetic polynucleotide
ggttccggtggtgaaccgtccgagtctggtagctcaggtagcgaaggttcttctggtccgggtgagtcttcaggttctggtggcgaaccgtccgaatctggtagctca

SEQ ID NO: 189 - protein, 36 aa, Artificial Sequence; identical to SEQ ID NO: 175
  Description of Artificial Sequence: Synthetic polypeptide

SEQ ID NO: 190 - DNA, 108 bp, Artificial Sequence
  Description of Artificial Sequence: Synthetic polynucleotide
ggttctggtggcgaaccgtccgaatctggtagctcaggtgaatctcctggtggttccagcggttccgagtcaggttctggtggcgaaccttccgaatctggtagctca

SEQ ID NO: 191 - protein, 36 aa, Artificial Sequence
  Description of Artificial Sequence: Synthetic polypeptide
GSSESGSSEGGPGSGGEPSESGSSGSSESGSSEGGP

SEQ ID NO: 192 - DNA, 108 bp, Artificial Sequence
  Description of Artificial Sequence: Synthetic polynucleotide
ggttcttccgaaagcggttcttccgagggcggtccaggttccggtggtgaaccatctgaatctggtagctcaggttcttctgaaagcggttcttctgaaggtggtcca

SEQ ID NO: 193 - protein, 36 aa, Artificial Sequence
  Description of Artificial Sequence: Synthetic polypeptide
GSEGSSGPGESSGESPGGSSGSESGSEGSSGPGESS

SEQ ID NO: 194 - DNA, 108 bp, Artificial Sequence
  Description of Artificial Sequence: Synthetic polynucleotide
ggtagcgaaggttcttccggtcctggtgagtcttcaggtgaatctccaggtggctctagcggttccgagtcaggtagcgaaggttcttctggtcctggcgagtcctca

SEQ ID NO: 195 - protein, 36 aa, Artificial Sequence; identical to SEQ ID NO: 165
  Description of Artificial Sequence: Synthetic polypeptide

SEQ ID NO: 196 - DNA, 108 bp, Artificial Sequence
  Description of Artificial Sequence: Synthetic polynucleotide
ggttcctctgaaagcggttcttccgaaggcggtccaggttcttccgaaagcggttcttctgagggcggtccaggttcctccgaaagcggttcttctgagggtggtcca

SEQ ID NO: 197 - protein, 36 aa, Artificial Sequence; identical to SEQ ID NO: 149
  Description of Artificial Sequence: Synthetic polypeptide

SEQ ID NO: 198 - DNA, 108 bp, Artificial Sequence
  Description of Artificial Sequence: Synthetic polynucleotide
ggttctggtggcgaaccttccgagtctggtagctcaggtgaatctccgggtggttctagcggttccgagtcaggtgaatctccgggtggttccagcggttctgagtca

SEQ ID NO: 199 - protein, 36 aa, Artificial Sequence
  Description of Artificial Sequence: Synthetic polypeptide
GSGGEPSESGSSGSEGSSGPGESSGESPGGSSGSES

SEQ ID NO: 200 - DNA, 108 bp, Artificial Sequence
  Description of Artificial Sequence: Synthetic polynucleotide
ggttctggtggcgaaccatctgagtctggtagctcaggtagcgaaggttcttccggtccaggcgagtcttcaggtgaatctcctggtggctccagcggttctgagtca

SEQ ID NO: 201 - protein, 36 aa, Artificial Sequence
  Description of Artificial Sequence: Synthetic polypeptide
GESPGGSSGSESGESPGGSSGSESGESPGGSSGSES

SEQ ID NO: 202 - DNA, 108 bp, Artificial Sequence
  Description of Artificial Sequence: Synthetic polynucleotide
ggtgaatctcctggtggttccagcggttccgagtcaggtgaatctccaggtggctctagcggttccgagtcaggtgaatctcctggtggttctagcggttctgaatca

SEQ ID NO: 203 - protein, 36 aa, Artificial Sequence
  Description of Artificial Sequence: Synthetic polypeptide
GSEGSSGPGESSGSEGSSGPGESSGSGGEPSESGSS

SEQ ID NO: 204 - DNA, 108 bp, Artificial Sequence
  Description of Artificial Sequence: Synthetic polynucleotide
ggtagcgaaggttcttccggtccaggtgaatcttcaggtagcgaaggttcttctggtcctggtgaatcctcaggttccggtggcgaaccatctgaatctggtagctca

SEQ ID NO: 205 - protein, 36 aa, Artificial Sequence; identical to SEQ ID NO: 199
  Description of Artificial Sequence: Synthetic polypeptide

SEQ ID NO: 206 - DNA, 108 bp, Artificial Sequence
  Description of Artificial Sequence: Synthetic polynucleotide
ggttctggtggcgaaccatccgaatctggtagctcaggtagcgaaggttcttctggtcctggcgaatcttcaggtgaatctccaggtggctctagcggttccgaatca

SEQ ID NO: 207 - protein, 36 aa, Artificial Sequence; identical to SEQ ID NO: 155
  Description of Artificial Sequence: Synthetic polypeptide

SEQ ID NO: 208 - DNA, 108 bp, Artificial Sequence
  Description of Artificial Sequence: Synthetic polynucleotide
ggttccggtggtgaaccgtccgaatctggtagctcaggttcctctgaaagcggttcttccgagggtggtccaggttccggtggtgaaccttctgagtctggtagctca

SEQ ID NO: 209 - protein, 36 aa, Artificial Sequence
  Description of Artificial Sequence: Synthetic polypeptide
GSSESGSSEGGPGSGGEPSESGSSGSEGSSGPGESS

SEQ ID NO: 210 - DNA, 108 bp, Artificial Sequence
  Description of Artificial Sequence: Synthetic polynucleotide
ggttcctctgaaagcggttcttctgagggcggtccaggttctggtggcgaaccatctgaatctggtagctcaggtagcgaaggttcttccggtccgggtgaatcttca

SEQ ID NO: 211 - protein, 36 aa, Artificial Sequence
  Description of Artificial Sequence: Synthetic polypeptide
GSGGEPSESGSSGSEGSSGPGESSGSEGSSGPGESS

SEQ ID NO: 212 - DNA, 108 bp, Artificial Sequence
  Description of Artificial Sequence: Synthetic polynucleotide
ggttctggtggtgaaccgtccgaatctggtagctcaggtagcgaaggttcttctggtcctggcgagtcttcaggtagcgaaggttcttctggtcctggtgaatcttca

SEQ ID NO: 213 - protein, 36 aa, Artificial Sequence; identical to SEQ ID NO: 155
  Description of Artificial Sequence: Synthetic polypeptide

SEQ ID NO: 214 - DNA, 108 bp, Artificial Sequence
  Description of Artificial Sequence: Synthetic polynucleotide
ggttctggtggcgaaccatccgagtctggtagctcaggttcttccgaaagcggttcttccgaaggcggtccaggttctggtggtgaaccgtccgaatctggtagctca

SEQ ID NO: 215 - protein, 36 aa, Artificial Sequence; identical to SEQ ID NO: 149
  Description of Artificial Sequence: Synthetic polypeptide

SEQ ID NO: 216 - DNA, 108 bp, Artificial Sequence
  Description of Artificial Sequence: Synthetic polynucleotide
ggttccggtggcgaaccttccgaatctggtagctcaggtgaatctccgggtggttctagcggttccgaatcaggtgaatctccaggtggttctagcggttccgaatca

SEQ ID NO: 217 - protein, 36 aa, Artificial Sequence
  Description of Artificial Sequence: Synthetic polypeptide
GSGGEPSESGSSGSGGEPSESGSSGESPGGSSGSES

SEQ ID NO: 218 - DNA, 108 bp, Artificial Sequence
  Description of Artificial Sequence: Synthetic polynucleotide
ggttccggtggtgaaccatctgagtctggtagctcaggttccggtggcgaaccgtccgagtctggtagctcaggtgaatctccgggtggttccagcggttccgaatca

SEQ ID NO: 219 - protein, 36 aa, Artificial Sequence
  Description of Artificial Sequence: Synthetic polypeptide
GSEGSSGPGESSGSSESGSSEGGPGSEGSSGPGESS

SEQ ID NO: 220 - DNA, 108 bp, Artificial Sequence
  Description of Artificial Sequence: Synthetic polynucleotide
ggtagcgaaggttcttctggtccgggcgaatcctcaggttcctccgaaagcggttcttccgaaggtggtccaggtagcgaaggttcttccggtcctggtgaatcttca

SEQ ID NO: 221 - protein, 36 aa, Artificial Sequence
  Description of Artificial Sequence: Synthetic polypeptide
GSSESGSSEGGPGESPGGSSGSESGESPGGSSGSES

SEQ ID NO: 222 - DNA, 108 bp, Artificial Sequence
  Description of Artificial Sequence: Synthetic polynucleotide
ggttcctctgaaagcggttcttctgaaggcggtccaggtgaatctccgggtggctccagcggttctgaatcaggtgaatctcctggtggctccagcggttccgagtca

SEQ ID NO: 223 - protein, 36 aa, Artificial Sequence; identical to SEQ ID NO: 203
  Description of Artificial Sequence: Synthetic polypeptide

SEQ ID NO: 224 - DNA, 108 bp, Artificial Sequence
  Description of Artificial Sequence: Synthetic polynucleotide
ggtagcgaaggttcttctggtccaggcgagtcttcaggtagcgaaggttcttccggtcctggcgagtcttcaggttccggtggcgaaccgtccgaatctggtagctca

SEQ ID NO: 225 - protein, 12 aa, Artificial Sequence
  Description of Artificial Sequence: Synthetic peptide
GSPAGSPTSTEE

SEQ ID NO: 226 - protein, 12 aa, Artificial Sequence
  Description of Artificial Sequence: Synthetic peptide
GSEPATSGSETP

SEQ ID NO: 227 - protein, 12 aa, Artificial Sequence
  Description of Artificial Sequence: Synthetic peptide
GTSESATPESGP

SEQ ID NO: 228 - protein, 12 aa, Artificial Sequence
  Description of Artificial Sequence: Synthetic peptide
GTSTEPSEGSAP

SEQ ID NO: 229 - DNA, 36 bp, Artificial Sequence
  Description of Artificial Sequence: Synthetic oligonucleotide
aggtagcccdgcwggytctccdacytcyacygarga

SEQ ID NO: 230 - DNA, 36 bp, Artificial Sequence
  Description of Artificial Sequence: Synthetic oligonucleotide
accttcytcrgtrgargthggagarccwgchgggct

SEQ ID NO: 231 - DNA, 36 bp, Artificial Sequence
  Description of Artificial Sequence: Synthetic oligonucleotide
aggtagcgaacckgcwacytcyggytctgaracycc

SEQ ID NO: 232 - DNA, 36 bp, Artificial Sequence
  Description of Artificial Sequence: Synthetic oligonucleotide
acctggrgtytcagarccrgargtwgcmggttcgct

SEQ ID NO: 233 - DNA, 36 bp, Artificial Sequence
  Description of Artificial Sequence: Synthetic oligonucleotide
aggtacytctgaaagcgcwacycckgartcyggycc

SEQ ID NO: 234 - DNA, 36 bp, Artificial Sequence
  Description of Artificial Sequence: Synthetic oligonucleotide
acctggrccrgaytcmggrgtwgcgctttcagargt

SEQ ID NO: 235 - DNA, 36 bp, Artificial Sequence
  Description of Artificial Sequence: Synthetic oligonucleotide
aggtacytctacygaaccktcygarggyagcgcwcc

SEQ ID NO: 236 - DNA, 36 bp, Artificial Sequence
  Description of Artificial Sequence: Synthetic oligonucleotide
acctggwgcgctrccytcrgamggttcrgtagargt

SEQ ID NO: 237 - DNA, 24 bp, Artificial Sequence
  Description of Artificial Sequence: Synthetic oligonucleotide
aggttcgtcttcactcgagggtac

SEQ ID NO: 238 - DNA, 16 bp, Artificial Sequence
  Description of Artificial Sequence: Synthetic oligonucleotide
cctcgagtgaagacga

SEQ ID NO: 239 - protein, 36 aa, Artificial Sequence
  Description of Artificial Sequence: Synthetic polypeptide
GSPAGSPTSTEEGTSESATPESGPGTSTEPSEGSAP

SEQ ID NO: 240 - DNA, 108 bp, Artificial Sequence
  Description of Artificial Sequence: Synthetic polynucleotide
ggtagcccggcaggctctccgacctctactgaggaaggtacttctgaaagcgcaaccccggagtccggcccaggtacctctaccgaaccgtctgagggcagcgcacca

SEQ ID NO: 241 - protein, 36 aa, Artificial Sequence
  Description of Artificial Sequence: Synthetic polypeptide
GTSTEPSEGSAPGTSTEPSEGSAPGTSTEPSEGSAP

SEQ ID NO: 242 - DNA, 108 bp, Artificial Sequence
  Description of Artificial Sequence: Synthetic polynucleotide
ggtacttctaccgaaccgtccgaaggcagcgctccaggtacctctactgaaccttccgagggcagcgctccaggtacctctaccgaaccttctgaaggtagcgcacca

SEQ ID NO: 243 - protein, 36 aa, Artificial Sequence
  Description of Artificial Sequence: Synthetic polypeptide
GTSTEPSEGSAPGTSESATPESGPGTSESATPESGP

SEQ ID NO: 244 - DNA, 108 bp, Artificial Sequence
  Description of Artificial Sequence: Synthetic polynucleotide
ggtacctctaccgaaccgtctgaaggtagcgcaccaggtacctctgaaagcgcaactcctgagtccggtccaggtacttctgaaagcgcaaccccggagtctggccca

SEQ ID NO: 245 - protein, 36 aa, Artificial Sequence; identical to SEQ ID NO: 243
  Description of Artificial Sequence: Synthetic polypeptide

SEQ ID NO: 246 - DNA, 108 bp, Artificial Sequence
  Description of Artificial Sequence: Synthetic polynucleotide
ggtacttctactgaaccgtctgaaggtagcgcaccaggtacttctgaaagcgcaaccccggaatccggcccaggtacctctgaaagcgcaaccccggagtccggccca

SEQ ID NO: 247 - protein, 36 aa, Artificial Sequence
  Description of Artificial Sequence: Synthetic polypeptide
GSEPATSGSETPGTSESATPESGPGSPAGSPTSTEE

SEQ ID NO: 248 - DNA, 108 bp, Artificial Sequence
  Description of Artificial Sequence: Synthetic polynucleotide
ggtagcgaaccggcaacctccggctctgaaaccccaggtacctctgaaagcgctactcctgaatccggcccaggtagcccggcaggttctccgacttccactgaggaa

SEQ ID NO: 249 - protein, 36 aa, Artificial Sequence
  Description of Artificial Sequence: Synthetic polypeptide
GTSESATPESGPGSEPATSGSETPGTSTEPSEGSAP

SEQ ID NO: 250 - DNA, 108 bp, Artificial Sequence
  Description of Artificial Sequence: Synthetic polynucleotide
ggtacttctgaaagcgcaacccctgaatccggtccaggtagcgaaccggctacttctggctctgagactccaggtacttctaccgaaccgtccgaaggtagcgcacca

SEQ ID NO: 251 - protein, 36 aa, Artificial Sequence
  Description of Artificial Sequence: Synthetic polypeptide
GSPAGSPTSTEEGSPAGSPTSTEEGSEPATSGSETP

SEQ ID NO: 252 - DNA, 108 bp, Artificial Sequence
  Description of Artificial Sequence: Synthetic polynucleotide
ggtagcccggctggctctccaacctccactgaggaaggtagcccggctggctctccaacctccactgaagaaggtagcgaaccggctacctccggctctgaaactcca

SEQ ID NO: 253 - protein, 36 aa, Artificial Sequence; identical to SEQ ID NO: 239
  Description of Artificial Sequence: Synthetic polypeptide

SEQ ID NO: 254 - DNA, 108 bp, Artificial Sequence
  Description of Artificial Sequence: Synthetic polynucleotide
ggtagcccggctggctctcctacctctactgaggaaggtacttctgaaagcgctactcctgagtctggtccaggtacctctactgaaccgtccgaaggtagcgctcca

SEQ ID NO: 255 - protein, 36 aa, Artificial Sequence
  Description of Artificial Sequence: Synthetic polypeptide
GSPAGSPTSTEEGSPAGSPTSTEEGTSTEPSEGSAP

SEQ ID NO: 256 - DNA, 108 bp, Artificial Sequence
  Description of Artificial Sequence: Synthetic polynucleotide
ggtagccctgctggctctccgacttctactgaggaaggtagcccggctggttctccgacttctactgaggaaggtacttctaccgaaccttccgaaggtagcgctcca

SEQ ID NO: 257 - protein, 36 aa, Artificial Sequence
  Description of Artificial Sequence: Synthetic polypeptide
GTSESATPESGPGTSTEPSEGSAPGTSTEPSEGSAP

SEQ ID NO: 258 - DNA, 108 bp, Artificial Sequence
  Description of Artificial Sequence: Synthetic polynucleotide
ggtacttctgaaagcgctactccggagtccggtccaggtacctctaccgaaccgtccgaaggcagcgctccaggtacttctactgaaccttctgagggtagcgctcca

SEQ ID NO: 259 - protein, 36 aa, Artificial Sequence
  Description of Artificial Sequence: Synthetic polypeptide
GTSTEPSEGSAPGSPAGSPTSTEEGTSTEPSEGSAP

SEQ ID NO: 260 - DNA, 108 bp, Artificial Sequence
  Description of Artificial Sequence: Synthetic polynucleotide
ggtacctctaccgaaccttccgaaggtagcgctccaggtagcccggcaggttctcctacttccactgaggaaggtacttctaccgaaccttctgagggtagcgcacca

SEQ ID NO: 261 - protein, 36 aa, Artificial Sequence
  Description of Artificial Sequence: Synthetic polypeptide
GSEPATSGSETPGSPAGSPTSTEEGTSESATPESGP

SEQ ID NO: 262 - DNA, 108 bp, Artificial Sequence
  Description of Artificial Sequence: Synthetic polynucleotide
ggtagcgaaccggctacttccggctctgagactccaggtagccctgctggctctccgacctctaccgaagaaggtacctctgaaagcgctacccctgagtctggccca

SEQ ID NO: 263 - protein, 36 aa, Artificial Sequence; identical to SEQ ID NO: 243
  Description of Artificial Sequence: Synthetic polypeptide

SEQ ID NO: 264 - DNA, 108 bp, Artificial Sequence
  Description of Artificial Sequence: Synthetic polynucleotide
ggtacttctaccgaaccttccgagggcagcgcaccaggtacttctgaaagcgctacccctgagtccggcccaggtacttctgaaagcgctactcctgaatccggtcca

SEQ ID NO: 265 - protein, 36 aa, Artificial Sequence
  Description of Artificial Sequence: Synthetic polypeptide
GTSTEPSEGSAPGSEPATSGSETPGSPAGSPTSTEE

SEQ ID NO: 266 - DNA, 108 bp, Artificial Sequence
  Description of Artificial Sequence: Synthetic polynucleotide
ggtacttctactgaaccgtctgaaggcagcgcaccaggtagcgaaccggctacttccggttctgaaaccccaggtagcccagcaggttctccaacttctactgaagaa

SEQ ID NO: 267 - protein, 36 aa, Artificial Sequence
  Description of Artificial Sequence: Synthetic polypeptide
GSPAGSPTSTEEGTSESATPESGPGSEPATSGSETP

SEQ ID NO: 268 - DNA, 108 bp, Artificial Sequence
  Description of Artificial Sequence: Synthetic polynucleotide
ggtagccctgctggctctccaacctccaccgaagaaggtacctctgaaagcgcaacccctgaatccggcccaggtagcgaaccggcaacctccggttctgaaacccca

SEQ ID NO: 269 - protein, 36 aa, Artificial Sequence
  Description of Artificial Sequence: Synthetic polypeptide
GTSESATPESGPGSPAGSPTSTEEGSPAGSPTSTEE

SEQ ID NO: 270 - DNA, 108 bp, Artificial Sequence
  Description of Artificial Sequence: Synthetic polynucleotide
ggtacttctgaaagcgctactcctgagtccggcccaggtagcccggctggctctccgacttccaccgaggaaggtagcccggctggctctccaacttctactgaagaa

SEQ ID NO: 271 - protein, 36 aa, Artificial Sequence
  Description of Artificial Sequence: Synthetic polypeptide
GTSTEPSEGSAPGTSESATPESGPGTSTEPSEGSAP

SEQ ID NO: 272 - DNA, 108 bp, Artificial Sequence
  Description of Artificial Sequence: Synthetic polynucleotide
ggtacctctactgaaccttctgagggcagcgctccaggtacttctgaaagcgctaccccggagtccggtccaggtacttctactgaaccgtccgaaggtagcgcacca

SEQ ID NO: 273 - protein, 36 aa, Artificial Sequence
  Description of Artificial Sequence: Synthetic polypeptide
GSPAGSPTSTEEGTSTEPSEGSAPGSEPATSGSETP

SEQ ID NO: 274 - DNA, 108 bp, Artificial Sequence
  Description of Artificial Sequence: Synthetic polynucleotide
ggtagcccggcaggctctccgacttccaccgaggaaggtacctctactgaaccttctgagggtagcgctccaggtagcgaaccggcaacctctggctctgaaacccca

SEQ ID NO: 275 - protein, 36 aa, Artificial Sequence
  Description of Artificial Sequence: Synthetic polypeptide
GSPAGSPTSTEEGTSTEPSEGSAPGTSTEPSEGSAP

SEQ ID NO: 276 - DNA, 108 bp, Artificial Sequence
  Description of Artificial Sequence: Synthetic polynucleotide
ggtagcccagcaggctctccgacttccactgaggaaggtacttctactgaaccttccgaaggcagcgcaccaggtacctctactgaaccttctgagggcagcgctcca

SEQ ID NO: 277 - protein, 36 aa, Artificial Sequence; identical to SEQ ID NO: 247
  Description of Artificial Sequence: Synthetic polypeptide

SEQ ID NO: 278 - DNA, 108 bp, Artificial Sequence
  Description of Artificial Sequence: Synthetic polynucleotide
ggtagcgaacctgctacctccggttctgaaaccccaggtacctctgaaagcgcaactccggagtctggtccaggtagccctgcaggttctcctacctccactgaggaa

SEQ ID NO: 279 - protein, 36 aa, Artificial Sequence; identical to SEQ ID NO: 257
  Description of Artificial Sequence: Synthetic polypeptide

SEQ ID NO: 280 - DNA, 108 bp, Artificial Sequence
  Description of Artificial Sequence: Synthetic polynucleotide
ggtacctctgaaagcgctactccggagtctggcccaggtacctctactgaaccgtctgagggtagcgctccaggtacttctactgaaccgtccgaaggtagcgcacca

SEQ ID NO: 281 - protein, 36 aa, Artificial Sequence; identical to SEQ ID NO: 275
  Description of Artificial Sequence: Synthetic polypeptide

SEQ ID NO: 282 - DNA, 108 bp, Artificial Sequence
  Description of Artificial Sequence: Synthetic polynucleotide
ggtagcccggctggttctccgacttccaccgaggaaggtacctctactgaaccttctgagggtagcgctccaggtacctctactgaaccttccgaaggcagcgctcca

SEQ ID NO: 283 - protein, 36 aa, Artificial Sequence; identical to SEQ ID NO: 241
  Description of Artificial Sequence: Synthetic polypeptide

SEQ ID NO: 284 - DNA, 108 bp, Artificial Sequence
  Description of Artificial Sequence: Synthetic polynucleotide
ggtacttctaccgaaccgtccgagggcagcgctccaggtacttctactgaaccttctgaaggcagcgctccaggtacttctactgaaccttccgaaggtagcgcacca

SEQ ID NO: 285 - protein, 36 aa, Artificial Sequence
  Description of Artificial Sequence: Synthetic polypeptide
GSEPATSGSETPGTSESATPESGPGTSTEPSEGSAP

SEQ ID NO: 286 - DNA, 108 bp, Artificial Sequence
  Description of Artificial Sequence: Synthetic polynucleotide
ggtagcgaacctgcaacctctggctctgaaaccccaggtacctctgaaagcgctactcctgaatctggcccaggtacttctactgaaccgtccgagggcagcgcacca

SEQ ID NO: 287 - protein, 36 aa, Artificial Sequence; identical to SEQ ID NO: 259
  Description of Artificial Sequence: Synthetic polypeptide

SEQ ID NO: 288 - DNA, 108 bp, Artificial Sequence
  Description of Artificial Sequence: Synthetic polynucleotide
ggtacttctaccgaaccgtccgagggtagcgcaccaggtagcccagcaggttctcctacctccaccgaggaaggtacttctaccgaaccgtccgagggtagcgcacca

SEQ ID NO: 289 - protein, 36 aa, Artificial Sequence
  Description of Artificial Sequence: Synthetic polypeptide
GSEPATSGSETPGTSESATPESGPGSEPATSGSETP

SEQ ID NO: 290 - DNA, 108 bp, Artificial Sequence
  Description of Artificial Sequence: Synthetic polynucleotide
ggtagcgaaccggcaacctccggctctgaaactccaggtacttctgaaagcgctactccggaatccggcccaggtagcgaaccggctacttccggctctgaaacccca

SEQ ID NO: 291 - protein, 36 aa, Artificial Sequence; identical to SEQ ID NO: 289
  Description of Artificial Sequence: Synthetic polypeptide

SEQ ID NO: 292 - DNA, 108 bp, Artificial Sequence
  Description of Artificial Sequence: Synthetic polynucleotide
ggtagcgaaccggcaacttccggctctgaaaccccaggtacttctgaaagcgctactcctgagtctggcccaggtagcgaacctgctacctctggctctgaaacccca

SEQ ID NO: 293 - protein, 36 aa, Artificial Sequence
  Description of Artificial Sequence: Synthetic polypeptide
GSEPATSGSETPGSEPATSGSETPGTSTEPSEGSAP

SEQ ID NO: 294 - DNA, 108 bp, Artificial Sequence
  Description of Artificial Sequence: Synthetic polynucleotide
ggtagcgaaccggcaacctctggctctgaaactccaggtagcgaacctgcaacctccggctctgaaaccccaggtacttctactgaaccttctgagggcagcgcacca

SEQ ID NO: 295 - protein, 36 aa, Artificial Sequence
  Description of Artificial Sequence: Synthetic polypeptide
GTSESATPESGPGSEPATSGSETPGSEPATSGSETP

SEQ ID NO: 296 - DNA, 108 bp, Artificial Sequence
  Description of Artificial Sequence: Synthetic polynucleotide
ggtacttctgaaagcgctaccccggaatctggcccaggtagcgaaccggctacttctggttctgaaaccccaggtagcgaaccggctacctccggttctgaaactcca

SEQ ID NO: 297 - protein, 36 aa, Artificial Sequence
  Description of Artificial Sequence: Synthetic polypeptide
GTSTEPSEGSAPGTSTEPSEGSAPGTSESATPESGP

SEQ ID NO: 298 - DNA, 108 bp, Artificial Sequence
  Description of Artificial Sequence: Synthetic polynucleotide
ggtacctctactgaaccttccgaaggcagcgctccaggtacctctaccgaaccgtccgagggcagcgcaccaggtacttctgaaagcgcaacccctgaatccggtcca

SEQ ID NO: 299 - protein, 36 aa, Artificial Sequence
  Description of Artificial Sequence: Synthetic polypeptide
GSEPATSGSETPGTSESATPESGPGTSESATPESGP

SEQ ID NO: 300 - DNA, 108 bp, Artificial Sequence
  Description of Artificial Sequence: Synthetic polynucleotide
ggtagcgaaccggcaacctctggctctgaaaccccaggtacctctgaaagcgctactccggaatctggtccaggtacttctgaaagcgctactccggaatccggtcca

SEQ ID NO: 301 - protein, 36 aa, Artificial Sequence; identical to SEQ ID NO: 293
  Description of Artificial Sequence: Synthetic polypeptide

SEQ ID NO: 302 - DNA, 108 bp, Artificial Sequence
  Description of Artificial Sequence: Synthetic polynucleotide
ggtagcgaacctgctacctccggctctgaaactccaggtagcgaaccggctacttccggttctgaaactccaggtacctctaccgaaccttccgaaggcagcgcacca

SEQ ID NO: 303 - protein, 36 aa, Artificial Sequence
  Description of Artificial Sequence: Synthetic polypeptide
GSEPATSGSETPGTSTEPSEGSAPGSEPATSGSETP

SEQ ID NO: 304 - DNA, 108 bp, Artificial Sequence
  Description of Artificial Sequence: Synthetic polynucleotide
ggtagcgaacctgctacttctggttctgaaactccaggtacttctaccgaaccgtccgagggtagcgctccaggtagcgaacctgctacttctggttctgaaactcca

SEQ ID NO: 305 - protein, 36 aa, Artificial Sequence
  Description of Artificial Sequence: Synthetic polypeptide
GTSTEPSEGSAPGTSTEPSEGSAPGSEPATSGSETP

SEQ ID NO: 306 - DNA, 108 bp, Artificial Sequence
  Description of Artificial Sequence: Synthetic polynucleotide
ggtacctctaccgaaccgtccgagggtagcgcaccaggtacctctactgaaccgtctgagggtagcgctccaggtagcgaaccggcaacctccggttctgaaactcca

SEQ ID NO: 307 - protein, 36 aa, Artificial Sequence; identical to SEQ ID NO: 265
  Description of Artificial Sequence: Synthetic polypeptide

SEQ ID NO: 308 - DNA, 108 bp, Artificial Sequence
  Description of Artificial Sequence: Synthetic polynucleotide
ggtacttctactgaaccttccgaaggtagcgctccaggtagcgaacctgctacttctggttctgaaaccccaggtagcccggctggctctccgacctccaccgaggaa

SEQ ID NO: 309 - protein, 36 aa, Artificial Sequence; identical to SEQ ID NO: 261
  Description of Artificial Sequence: Synthetic polypeptide

SEQ ID NO: 310 - DNA, 108 bp, Artificial Sequence
  Description of Artificial Sequence: Synthetic polynucleotide
ggtagcgaaccggctacttccggctctgagactccaggtagcccagctggttctccaacctctactgaggaaggtacttctgaaagcgctacccctgaatctggtcca

SEQ ID NO: 311 - protein, 36 aa, Artificial Sequence
  Description of Artificial Sequence: Synthetic polypeptide
GTSESATPESGPGSEPATSGSETPGTSESATPESGP

SEQ ID NO: 312 - DNA, 108 bp, Artificial Sequence
  Description of Artificial Sequence: Synthetic polynucleotide
ggtacctctgaaagcgcaactcctgagtctggcccaggtagcgaacctgctacctccggctctgagactccaggtacctctgaaagcgcaaccccggaatctggtcca

SEQ ID NO: 313 - protein, 12 aa, Artificial Sequence
  Description of Artificial Sequence: Synthetic peptide
GSTSESPSGTAP

SEQ ID NO: 314 - protein, 12 aa, Artificial Sequence
  Description of Artificial Sequence: Synthetic peptide
GTSTPESGSASP

SEQ ID NO: 315 - protein, 12 aa, Artificial Sequence
  Description of Artificial Sequence: Synthetic peptide
GTSPSGESSTAP

SEQ ID NO: 316 - protein, 12 aa, Artificial Sequence
  Description of Artificial Sequence: Synthetic peptide
GSTSSTAESPGP

SEQ ID NO: 317 - DNA, 36 bp, Artificial Sequence
  Description of Artificial Sequence: Synthetic oligonucleotide
aggttctacyagcgaatcyccktctggyacygcwcc

SEQ ID NO: 318 - DNA, 36 bp, Artificial Sequence
  Description of Artificial Sequence: Synthetic oligonucleotide
acctggwgcrgtrccagamggrgattcgctrgtaga

SEQ ID NO: 319 - DNA, 36 bp, Artificial Sequence
  Description of Artificial Sequence: Synthetic oligonucleotide
aggtacytctacycckgaaagcggytcygcwtctcc

SEQ ID NO: 320 - DNA, 36 bp, Artificial Sequence
  Description of Artificial Sequence: Synthetic oligonucleotide
acctggagawgcrgarccgctttcmggrgtagargt

SEQ ID NO: 321 - DNA, 36 bp, Artificial Sequence
  Description of Artificial Sequence: Synthetic oligonucleotide
aggtacytcycckagcggygaatcttctacygcwcc

SEQ ID NO: 322 - DNA, 36 bp, Artificial Sequence
  Description of Artificial Sequence: Synthetic oligonucleotide
acctggwgcrgtagaagattcrccgctmggrgargt

SEQ ID NO: 323 - DNA, 36 bp, Artificial Sequence
  Description of Artificial Sequence: Synthetic oligonucleotide
aggttcyacyagctctacygcwgaatctcckggycc

SEQ ID NO: 324 - DNA, 36 bp, Artificial Sequence
  Description of Artificial Sequence: Synthetic oligonucleotide
acctggrccmggagattcwgcrgtagagctrgtrga

SEQ ID NO: 325 - DNA, 24 bp, Artificial Sequence
  Description of Artificial Sequence: Synthetic oligonucleotide
aggttcgtcttcactcgagggtac

SEQ ID NO: 326 - DNA, 16 bp, Artificial Sequence
  Description of Artificial Sequence: Synthetic oligonucleotide
cctcgagtgaagacga

SEQ ID NO: 327 - protein, 36 aa, Artificial Sequence
  Description of Artificial Sequence: Synthetic polypeptide
GTSTPESGSASPGTSPSGESSTAPGTSPSGESSTAP

SEQ ID NO: 328 - DNA, 108 bp, Artificial Sequence
  Description of Artificial Sequence: Synthetic polynucleotide
ggtacttctactccggaaagcggttccgcatctccaggtacttctcctagcggtgaatcttctactgctccaggtacctctcctagcggcgaatcttctactgctcca

SEQ ID NO: 329 - protein, 36 aa, Artificial Sequence
  Description of Artificial Sequence: Synthetic polypeptide
GTSPSGESSTAPGSTSSTAESPGPGTSPSGESSTAP

SEQ ID NO: 330 - DNA, 108 bp, Artificial Sequence
  Description of Artificial Sequence: Synthetic polynucleotide
ggtacttctccgagcggtgaatcttctaccgcaccaggttctactagctctaccgctgaatctccgggcccaggtacttctccgagcggtgaatcttctactgctcca

SEQ ID NO: 331 - protein, 36 aa, Artificial Sequence
  Description of Artificial Sequence: Synthetic polypeptide
GSTSSTAESPGPGTSPSGESSTAPGTSTPESGSASP

SEQ ID NO: 332 - DNA, 108 bp, Artificial Sequence
  Description of Artificial Sequence: Synthetic polynucleotide
ggttccaccagctctactgctgaatctcctggtccaggtacctctcctagcggtgaatcttctactgctccaggtacttctactcctgaaagcggctctgcttctcca

SEQ ID NO: 333 - protein, 36 aa, Artificial Sequence
  Description of Artificial Sequence: Synthetic polypeptide
GSTSSTAESPGPGSTSSTAESPGPGTSPSGESSTAP

SEQ ID NO: 334 - DNA, 108 bp, Artificial Sequence
  Description of Artificial Sequence: Synthetic polynucleotide
ggttctaccagctctactgcagaatctcctggcccaggttccaccagctctaccgcagaatctccgggtccaggtacttcccctagcggtgaatcttctaccgcacca

SEQ ID NO: 335 - protein, 36 aa, Artificial Sequence; identical to SEQ ID NO: 331
  Description of Artificial Sequence: Synthetic polypeptide

SEQ ID NO: 336 - DNA, 108 bp, Artificial Sequence
  Description of Artificial Sequence: Synthetic polynucleotide
ggttctactagctctactgctgaatctcctggcccaggtacttctcctagcggtgaatcttctaccgctccaggtacctctactccggaaagcggttctgcatctcca

SEQ ID NO: 337 - protein, 36 aa, Artificial Sequence
  Description of Artificial Sequence: Synthetic polypeptide
GSTSSTAESPGPGTSTPESGSASPGSTSESPSGTAP

SEQ ID NO: 338 - DNA, 108 bp, Artificial Sequence
  Description of Artificial Sequence: Synthetic polynucleotide
ggttctaccagctctaccgcagaatctcctggtccaggtacctctactccggaaagcggctctgcatctccaggttctactagcgaatctccttctggcactgcacca

SEQ ID NO: 339 - protein, 36 aa, Artificial Sequence
  Description of Artificial Sequence: Synthetic polypeptide
GSTSSTAESPGPGTSTPESGSASPGTSTPESGSASP

SEQ ID NO: 340 - DNA, 108 bp, Artificial Sequence
  Description of Artificial Sequence: Synthetic polynucleotide
ggttctactagctctactgcagaatctcctggcccaggtacctctactccggaaagcggctctgcatctccaggtacttctacccctgaaagcggttctgcatctcca

SEQ ID NO: 341 - protein, 36 aa, Artificial Sequence
  Description of Artificial Sequence: Synthetic polypeptide
GSTSESPSGTAPGTSPSGESSTAPGSTSESPSGTAP

SEQ ID NO: 342 - DNA, 108 bp, Artificial Sequence
  Description of Artificial Sequence: Synthetic polynucleotide
ggttctaccagcgaatctccttctggcaccgctccaggtacctctcctagcggcgaatcttctaccgctccaggttctactagcgaatctccttctggcactgcacca

SEQ ID NO: 343 - protein, 36 aa, Artificial Sequence; identical to SEQ ID NO: 333
  Description of Artificial Sequence: Synthetic polypeptide

SEQ ID NO: 344 - DNA, 108 bp, Artificial Sequence
  Description of Artificial Sequence: Synthetic polynucleotide
ggttccaccagctctactgcagaatctccgggcccaggttctactagctctactgcagaatctccgggtccaggtacttctcctagcggcgaatcttctaccgctcca

SEQ ID NO: 345 - protein, 36 aa, Artificial Sequence; identical to SEQ ID NO: 337
  Description of Artificial Sequence: Synthetic polypeptide

SEQ ID NO: 346 - DNA, 108 bp, Artificial Sequence
  Description of Artificial Sequence: Synthetic polynucleotide
ggttccactagctctactgcagaatctcctggcccaggtacctctacccctgaaagcggctctgcatctccaggttctaccagcgaatccccgtctggcaccgcacca

SEQ ID NO: 347 - protein, 36 aa, Artificial Sequence; identical to SEQ ID NO: 333
  Description of Artificial Sequence: Synthetic polypeptide

SEQ ID NO: 348 - DNA, 108 bp, Artificial Sequence
  Description of Artificial Sequence: Synthetic polynucleotide
ggttctactagctctactgctgaatctccgggtccaggttctaccagctctactgctgaatctcctggtccaggtacctccccgagcggtgaatcttctactgcacca

SEQ ID NO: 349 - protein, 36 aa, Artificial Sequence
  Description of Artificial Sequence: Synthetic polypeptide
GSTSSTAESPGPGSTSESPSGTAPGSTSSTAESPGP

SEQ ID NO: 350 - DNA, 108 bp, Artificial Sequence
  Description of Artificial Sequence: Synthetic polynucleotide
ggttctaccagctctaccgctgaatctcctggcccaggttctaccagcgaatccccgtctggcaccgcaccaggttctactagctctaccgctgaatctccgggtcca

SEQ ID NO: 351 - protein, 36 aa, Artificial Sequence
  Description of Artificial Sequence: Synthetic polypeptide
GSTSSTAESPGPGSTSSTAESPGPGSTSSTAESPGP

SEQ ID NO: 352 - DNA, 108 bp, Artificial Sequence
  Description of Artificial Sequence: Synthetic polynucleotide
ggttctaccagctctaccgcagaatctcctggcccaggttccactagctctaccgctgaatctcctggtccaggttctactagctctaccgctgaatctcctggtcca

SEQ ID NO: 353 - protein, 36 aa, Artificial Sequence
  Description of Artificial Sequence: Synthetic polypeptide
GSTSESPSGTAPGSTSSTAESPGPGSTSSTAESPGP

SEQ ID NO: 354 - DNA, 108 bp, Artificial Sequence
  Description of Artificial Sequence: Synthetic polynucleotide
ggttctactagcgaatccccttctggtactgctccaggttccactagctctaccgctgaatctcctggcccaggttccactagctctactgcagaatctcctggtcca

SEQ ID NO: 355 - protein, 36 aa, Artificial Sequence
  Description of Artificial Sequence: Synthetic polypeptide
GSTSESPSGTAPGSTSESPSGTAPGSTSESPSGTAP

SEQ ID NO: 356 - DNA, 108 bp, Artificial Sequence
  Description of Artificial Sequence: Synthetic polynucleotide
ggttctactagcgaatctccttctggtaccgctccaggttctaccagcgaatccccgtctggtactgctccaggttctaccagcgaatctccttctggtactgcacca

SEQ ID NO: 357 - protein, 36 aa, Artificial Sequence; identical to SEQ ID NO: 351
  Description of Artificial Sequence: Synthetic polypeptide

SEQ ID NO: 358 - DNA, 108 bp, Artificial Sequence
  Description of Artificial Sequence: Synthetic polynucleotide
ggttccaccagctctactgctgaatctcctggcccaggttctaccagctctactgctgaatctccgggcccaggttccaccagctctaccgctgaatctccgggtcca

SEQ ID NO: 359 - protein, 36 aa, Artificial Sequence; identical to SEQ ID NO: 333
  Description of Artificial Sequence: Synthetic polypeptide

SEQ ID NO: 360 - DNA, 108 bp, Artificial Sequence
  Description of Artificial Sequence: Synthetic polynucleotide
ggttccactagctctaccgcagaatctcctggtccaggttctactagctctactgctgaatctccgggtccaggtacctcccctagcggcgaatcttctaccgctcca

SEQ ID NO: 361 - protein, 36 aa, Artificial Sequence
  Description of Artificial Sequence: Synthetic polypeptide
GSSPSASTGTGPGSSTPSGATGSPGSSTPSGATGSP

SEQ ID NO: 362 - DNA, 108 bp, Artificial Sequence
  Description of Artificial Sequence: Synthetic polynucleotide
ggttctagcccttctgcttccaccggtaccggcccaggtagctctactccgtctggtgcaactggctctccaggtagctctactccgtctggtgcaaccggctcccca

SEQ ID NO: 363 - protein, 36 aa, Artificial Sequence
  Description of Artificial Sequence: Synthetic polypeptide
GTSPSGESSTAPGTSTPESGSASPGSTSSTAESPGP

SEQ ID NO: 364 - DNA, 108 bp, Artificial Sequence
  Description of Artificial Sequence: Synthetic polynucleotide
ggtacttcccctagcggtgaatcttctactgctccaggtacctctactccggaaagcggctccgcatctccaggttctactagctctactgctgaatctcctggtcca

SEQ ID NO: 365 - protein, 36 aa, Artificial Sequence
  Description of Artificial Sequence: Synthetic polypeptide
GSTSSTAESPGPGSTSSTAESPGPGTSTPESGSASP

SEQ ID NO: 366 - DNA, 108 bp, Artificial Sequence
  Description of Artificial Sequence: Synthetic polynucleotide
ggttctactagctctaccgctgaatctccgggtccaggttctaccagctctactgcagaatctcctggcccaggtacttctactccggaaagcggttccgcttctcca

SEQ ID NO: 367 - protein, 36 aa, Artificial Sequence
  Description of Artificial Sequence: Synthetic polypeptide
GTSPSGESSTAPGSTSSTAESPGPGTSTPESGSASP

SEQ ID NO: 368 - DNA, 108 bp, Artificial Sequence
  Description of Artificial Sequence: Synthetic polynucleotide
ggtacttctcctagcggtgaatcttctaccgctccaggttctaccagctctactgctgaatctcctggcccaggtacttctaccccggaaagcggctccgcttctcca

SEQ ID NO: 369 - protein, 36 aa, Artificial Sequence; identical to SEQ ID NO: 353
  Description of Artificial Sequence: Synthetic polypeptide

SEQ ID NO: 370 - DNA, 108 bp, Artificial Sequence
  Description of Artificial Sequence: Synthetic polynucleotide
ggttctactagcgaatccccttctggtactgcaccaggttctaccagctctactgctgaatctccgggcccaggttccaccagctctaccgcagaatctcctggtcca

SEQ ID NO: 371 - protein, 36 aa, Artificial Sequence; identical to SEQ ID NO: 349
  Description of Artificial Sequence: Synthetic polypeptide

SEQ ID NO: 372 - DNA, 108 bp, Artificial Sequence
  Description of Artificial Sequence: Synthetic polynucleotide
ggttccaccagctctaccgctgaatctccgggcccaggttctaccagcgaatccccttctggcactgcaccaggttctactagctctaccgcagaatctccgggccca

SEQ ID NO: 373 - protein, 36 aa, Artificial Sequence; identical to SEQ ID NO: 331
  Description of Artificial Sequence: Synthetic polypeptide

SEQ ID NO: 374 - DNA, 108 bp, Artificial Sequence
  Description of Artificial Sequence: Synthetic polynucleotide
ggttctaccagctctactgctgaatctccgggtccaggtacttccccgagcggtgaatcttctactgcaccaggtacttctactccggaaagcggttccgcttctcca

SEQ ID NO: 375 - protein, 36 aa, Artificial Sequence
  Description of Artificial Sequence: Synthetic polypeptide
GSTSESPSGTAPGSTSESPSGTAPGTSPSGESSTAP

SEQ ID NO: 376 - DNA, 108 bp, Artificial Sequence
  Description of Artificial Sequence: Synthetic polynucleotide
ggttctaccagcgaatctccttctggcaccgctccaggttctactagcgaatccccgtctggtaccgcaccaggtacttctcctagcggcgaatcttctaccgcacca

SEQ ID NO: 377 - protein, 36 aa, Artificial Sequence
  Description of Artificial Sequence: Synthetic polypeptide
GSTSESPSGTAPGSTSESPSGTAPGTSTPESGSASP

SEQ ID NO: 378 - DNA, 108 bp, Artificial Sequence
  Description of Artificial Sequence: Synthetic polynucleotide
ggttctaccagcgaatccccttctggtactgctccaggttctaccagcgaatccccttctggcaccgcaccaggtacttctacccctgaaagcggctccgcttctcca

SEQ ID NO: 379 - protein, 36 aa, Artificial Sequence
  Description of Artificial Sequence: Synthetic polypeptide
GTSTPESGSASPGSTSSTAESPGPGSTSSTAESPGP

SEQ ID NO: 380 - DNA, 108 bp, Artificial Sequence
  Description of Artificial Sequence: Synthetic polynucleotide
ggtacctctactcctgaaagcggttctgcatctccaggttccactagctctaccgcagaatctccgggcccaggttctactagctctactgctgaatctcctggccca

SEQ ID NO: 381 - protein, 36 aa, Artificial Sequence; identical to SEQ ID NO: 375
  Description of Artificial Sequence: Synthetic polypeptide

SEQ ID NO: 382 - DNA, 108 bp, Artificial Sequence
  Description of Artificial Sequence: Synthetic polynucleotide
ggttctaccagcgaatccccttctggcactgcaccaggttctactagcgaatccccttctggtaccgcaccaggtacttctccgagcggcgaatcttctactgctcca

SEQ ID NO: 383 - protein, 36 aa, Artificial Sequence
  Description of Artificial Sequence: Synthetic polypeptide
GSTSSTAESPGPGSTSSTAESPGPGSTSESPSGTAP

SEQ ID NO: 384 - DNA, 108 bp, Artificial Sequence
  Description of Artificial Sequence: Synthetic polynucleotide
ggttctactagctctaccgctgaatctcctggcccaggttccactagctctaccgcagaatctccgggcccaggttctactagcgaatccccttctggtaccgctcca

SEQ ID NO: 385 - protein, 36 aa, Artificial Sequence; identical to SEQ ID NO: 365
  Description of Artificial Sequence: Synthetic polypeptide

SEQ ID NO: 386 - DNA, 108 bp, Artificial Sequence
  Description of Artificial Sequence: Synthetic polynucleotide
ggttccaccagctctactgcagaatctcctggcccaggttctactagctctaccgcagaatctcctggtccaggtacctctactcctgaaagcggttccgcatctcca

SEQ ID NO: 387 - protein, 36 aa, Artificial Sequence; identical to SEQ ID NO: 383
  Description of Artificial Sequence: Synthetic polypeptide

SEQ ID NO: 388 - DNA, 108 bp, Artificial Sequence
  Description of Artificial Sequence: Synthetic polynucleotide
ggttctactagctctactgctgaatctccgggcccaggttctactagctctaccgctgaatctccgggtccaggttctactagcgaatctccttctggtaccgctcca

SEQ ID NO: 389 - protein, 36 aa, Artificial Sequence
  Description of Artificial Sequence: Synthetic polypeptide
GTSPSGESSTAPGSTSESPSGTAPGSTSSTAESPGP

SEQ ID NO: 390 - DNA, 108 bp, Artificial Sequence
  Description of Artificial Sequence: Synthetic polynucleotide
ggtacctccccgagcggtgaatcttctactgcaccaggttctactagcgaatccccttctggtactgctccaggttccaccagctctactgcagaatctccgggtcca

SEQ ID NO: 391 - protein, 36 aa, Artificial Sequence
  Description of Artificial Sequence: Synthetic polypeptide
GSTSESPSGTAPGTSPSGESSTAPGSTSSTAESPGP

SEQ ID NO: 392 - DNA, 108 bp, Artificial Sequence
  Description of Artificial Sequence: Synthetic polynucleotide
ggttctactagcgaatccccgtctggtactgctccaggtacttcccctagcggtgaatcttctactgctccaggttctaccagctctaccgcagaatctccgggtcca

SEQ ID NO: 393 - protein, 36 aa, Artificial Sequence
  Description of Artificial Sequence: Synthetic polypeptide
GSTSSTAESPGPGSTSESPSGTAPGTSPSGESSTAP

SEQ ID NO: 394 - DNA, 108 bp, Artificial Sequence
  Description of Artificial Sequence: Synthetic polynucleotide
ggttctaccagctctaccgctgaatctcctggcccaggttctactagcgaatctccgtctggcaccgcaccaggtacttcccctagcggtgaatcttctactgcacca

SEQ ID NO: 395 - protein, 36 aa, Artificial Sequence; identical to SEQ ID NO: 377
  Description of Artificial Sequence: Synthetic polypeptide

SEQ ID NO: 396 - DNA, 108 bp, Artificial Sequence
  Description of Artificial Sequence: Synthetic polynucleotide
ggttctactagcgaatctccttctggcactgcaccaggttctaccagcgaatctccgtctggcactgcaccaggtacctctacccctgaaagcggttccgcttctcca

SEQ ID NO: 397 - protein, 36 aa, Artificial Sequence
  Description of Artificial Sequence: Synthetic polypeptide
GTSTPESGSASPGSTSESPSGTAPGSTSSTAESPGP

SEQ ID NO: 398 - DNA, 108 bp, Artificial Sequence
  Description of Artificial Sequence: Synthetic polynucleotide
ggtacctctactccggaaagcggttccgcatctccaggttctaccagcgaatccccgtctggcaccgcaccaggttctactagctctactgctgaatctccgggccca

SEQ ID NO: 399 - protein, 36 aa, Artificial Sequence
  Description of Artificial Sequence: Synthetic polypeptide
GSTSSTAESPGPGTSPSGESSTAPGTSPSGESSTAP

SEQ ID NO: 400 - DNA, 108 bp, Artificial Sequence
  Description of Artificial Sequence: Synthetic polynucleotide
ggttctactagctctactgcagaatctccgggcccaggtacctctcctagcggtgaatcttctaccgctccaggtacttctccgagcggtgaatcttctaccgctcca

SEQ ID NO: 401 - protein, 36 aa, Artificial Sequence
  Description of Artificial Sequence: Synthetic polypeptide
GTSPSGESSTAPGTSPSGESSTAPGTSPSGESSTAP

SEQ ID NO: 402 - DNA, 108 bp, Artificial Sequence
  Description of Artificial Sequence: Synthetic polynucleotide
ggtacctcccctagcggcgaatcttctactgctccaggtacctctcctagcggcgaatcttctaccgctccaggtacctcccctagcggtgaatcttctaccgcacca

SEQ ID NO: 403 - protein, 36 aa, Artificial Sequence; identical to SEQ ID NO: 337
  Description of Artificial Sequence: Synthetic polypeptide

SEQ ID NO: 404 - DNA, 108 bp, Artificial Sequence
  Description of Artificial Sequence: Synthetic polynucleotide
ggttccactagctctactgctgaatctcctggcccaggtacttctactccggaaagcggttccgcttctccaggttctactagcgaatctccgtctggcaccgcacca

SEQ ID NO: 405 - protein, 36 aa, Artificial Sequence
  Description of Artificial Sequence: Synthetic polypeptide
GSTSESPSGTAPGTSPSGESSTAPGTSPSGESSTAP

SEQ ID NO: 406 - DNA, 108 bp, Artificial Sequence
  Description of Artificial Sequence: Synthetic polynucleotide
ggttctactagcgaatctccgtctggcactgctccaggtacttctcctagcggtgaatcttctaccgctccaggtacttcccctagcggcgaatcttctaccgctcca

SEQ ID NO: 407 - protein, 36 aa, Artificial Sequence
  Description of Artificial Sequence: Synthetic polypeptide
GSTSESPSGTAPGTSTPESGSASPGSTSSTAESPGP

SEQ ID NO: 408 - DNA, 108 bp, Artificial Sequence
  Description of Artificial Sequence: Synthetic polynucleotide
ggttctactagcgaatctccttctggtaccgctccaggtacttctacccctgaaagcggctccgcttctccaggttccactagctctaccgctgaatctccgggtcca

SEQ ID NO: 409 - protein, 36 aa, Artificial Sequence; identical to SEQ ID NO: 383
  Description of Artificial Sequence: Synthetic polypeptide

SEQ ID NO: 410 - DNA, 108 bp, Artificial Sequence
  Description of Artificial Sequence: Synthetic polynucleotide
ggttccactagctctactgctgaatctcctggcccaggttctaccagctctaccgctgaatctcctggcccaggttctaccagcgaatctccgtctggcaccgcacca

SEQ ID NO: 411 - protein, 36 aa, Artificial Sequence
  Description of Artificial Sequence: Synthetic polypeptide
GSTSESPSGTAPGTSTPESGSASPGTSTPESGSASP

SEQ ID NO: 412 - DNA, 108 bp, Artificial Sequence
  Description of Artificial Sequence: Synthetic polynucleotide
ggttctactagcgaatccccgtctggtaccgcaccaggtacttctaccccggaaagcggctctgcttctccaggtacttctaccccggaaagcggctccgcatctcca

SEQ ID NO: 413 - protein, 36 aa, Artificial Sequence; identical to SEQ ID NO: 411
  Description of Artificial Sequence: Synthetic polypeptide

SEQ ID NO: 414 - DNA, 108 bp, Artificial Sequence
  Description of Artificial Sequence: Synthetic polynucleotide
ggttctactagcgaatccccgtctggtactgctccaggtacttctactcctgaaagcggttccgcttctccaggtacctctactccggaaagcggttctgcatctcca

SEQ ID NO: 415 - protein, 12 aa, Artificial Sequence
  Description of Artificial Sequence: Synthetic peptide
GTPGSGTASSSP

SEQ ID NO: 416 - protein, 12 aa, Artificial Sequence
  Description of Artificial Sequence: Synthetic peptide
GSSTPSGATGSP

SEQ ID NO: 417 - protein, 12 aa, Artificial Sequence
  Description of Artificial Sequence: Synthetic peptide
GSSPSASTGTGP

SEQ ID NO: 418 - protein, 12 aa, Artificial Sequence
  Description of Artificial Sequence: Synthetic peptide
GASPGTSSTGSP

SEQ ID NO: 419 - DNA, 36 bp, Artificial Sequence
  Description of Artificial Sequence: Synthetic oligonucleotide
aggtacycckggyagcggtacygcwtcttcytctcc

SEQ ID NO: 420 - DNA, 36 bp, Artificial Sequence
  Description of Artificial Sequence: Synthetic oligonucleotide
acctggagargaagawgcrgtaccgctrccmggrgt

SEQ ID NO: 421 - DNA, 36 bp, Artificial Sequence
  Description of Artificial Sequence: Synthetic oligonucleotide
aggtagctctacyccktctggtgcwacyggytcycc

SEQ ID NO: 422 - DNA, 36 bp, Artificial Sequence
  Description of Artificial Sequence: Synthetic oligonucleotide
acctggrgarccrgtwgcaccagamggrgtagagct

SEQ ID NO: 423 - DNA, 36 bp, Artificial Sequence
  Description of Artificial Sequence: Synthetic oligonucleotide
aggttctagcccktctgcwtcyacyggtacyggycc

SEQ ID NO: 424 - DNA, 36 bp, Artificial Sequence
  Description of Artificial Sequence: Synthetic oligonucleotide
acctggrccrgtaccrgtrgawgcagamgggctaga

SEQ ID NO: 425 - DNA, 36 bp, Artificial Sequence
  Description of Artificial Sequence: Synthetic oligonucleotide
aggtgcwtcycckggyacyagctctacyggttctcc

SEQ ID NO: 426 - DNA, 36 bp, Artificial Sequence
  Description of Artificial Sequence: Synthetic oligonucleotide
acctggagaaccrgtagagctrgtrccmggrgawgc

SEQ ID NO: 427 - DNA, 24 bp, Artificial Sequence
  Description of Artificial Sequence: Synthetic oligonucleotide
aggttcgtcttcactcgagggtac

SEQ ID NO: 428 - DNA, 16 bp, Artificial Sequence
  Description of Artificial Sequence: Synthetic oligonucleotide
cctcgagtgaagacga

SEQ ID NO: 429 - protein, 36 aa, Artificial Sequence
  Description of Artificial Sequence: Synthetic polypeptide
GASPGTSSTGSPGTPGSGTASSSPGSSTPSGATGSP

SEQ ID NO: 430 - DNA, 108 bp, Artificial Sequence
  Description of Artificial Sequence: Synthetic polynucleotide
ggtgcatccccgggcactagctctaccggttctccaggtactcctggtagcggtactgcttcttcttctccaggtagctctactccttctggtgctactggttctcca

SEQ ID NO: 431 - protein, 36 aa, Artificial Sequence
  Description of Artificial Sequence: Synthetic polypeptide
GSSTPSGATGSPGSSPSASTGTGPGSSTPSGATGSP

SEQ ID NO: 432 - DNA, 108 bp, Artificial Sequence
  Description of Artificial Sequence: Synthetic polynucleotide
ggtagctctaccccttctggtgctaccggctctccaggttctagcccgtctgcttctaccggtaccggtccaggtagctctaccccttctggtgctactggttctcca

SEQ ID NO: 433 - protein, 36 aa, Artificial Sequence
  Description of Artificial Sequence: Synthetic polypeptide
GASPGTSSTGSPGSSPSASTGTGPGSSTPSGATGSP

SEQ ID NO: 434 - DNA, 108 bp, Artificial Sequence
  Description of Artificial Sequence: Synthetic polynucleotide
ggtgcatctccgggtactagctctaccggttctccaggttctagcccttctgcttccactggtaccggcccaggtagctctaccccgtctggtgctactggttcccca

SEQ ID NO: 435 - protein, 36 aa, Artificial Sequence
  Description of Artificial Sequence: Synthetic polypeptide
GTPGSGTASSSPGSSTPSGATGSPGASPGTSSTGSP

SEQ ID NO: 436 - DNA, 108 bp, Artificial Sequence
  Description of Artificial Sequence: Synthetic polynucleotide
ggtactccgggcagcggtactgcttcttcctctccaggtagctctaccccttctggtgcaactggttccccaggtgcatcccctggtactagctctaccggttctcca

SEQ ID NO: 437 - protein, 36 aa, Artificial Sequence
  Description of Artificial Sequence: Synthetic polypeptide
GTPGSGTASSSPGASPGTSSTGSPGSRPSASTGTGP

SEQ ID NO: 438 - DNA, 108 bp, Artificial Sequence
  Description of Artificial Sequence: Synthetic polynucleotide
ggtacccctggcagcggtactgcttcttcttctccaggtgcttcccctggtaccagctctaccggttctccaggttctagaccttctgcatccaccggtactggtcca

SEQ ID NO: 439 - protein, 36 aa, Artificial Sequence
  Description of Artificial Sequence: Synthetic polypeptide
GASPGTSSTGSPGSSTPSGATGSPGASPGTSSTGSP

SEQ ID NO: 440 - DNA, 108 bp, Artificial Sequence
  Description of Artificial Sequence: Synthetic polynucleotide
ggtgcatctcctggtaccagctctaccggttctccaggtagctctactccttctggtgctactggctctccaggtgcttccccgggtaccagctctaccggttctcca

SEQ ID NO: 441 - protein, 36 aa, Artificial Sequence
  Description of Artificial Sequence: Synthetic polypeptide
GTPGSGTASSSPGSSTPSGATGSPGSSTPSGATGSP

SEQ ID NO: 442 - DNA, 108 bp, Artificial Sequence
  Description of Artificial Sequence: Synthetic polynucleotide
ggtaccccgggcagcggtaccgcatcttcctctccaggtagctctaccccgtctggtgctaccggttccccaggtagctctaccccgtctggtgcaaccggctcccca

SEQ ID NO: 443 - protein, 36 aa, Artificial Sequence
  Description of Artificial Sequence: Synthetic polypeptide
GASPGTSSTGSPGASPGTSSTGSPGASPGTSSTGSP

SEQ ID NO: 444 - DNA, 108 bp, Artificial Sequence
  Description of Artificial Sequence: Synthetic polynucleotide
ggtgcatctccgggcactagctctactggttctccaggtgcatcccctggcactagctctactggttctccaggtgcttctcctggtaccagctctactggttctcca

SEQ ID NO: 445 - protein, 36 aa, Artificial Sequence
  Description of Artificial Sequence: Synthetic polypeptide
GSSTPSGATGSPGSSPSASTGTGPGASPGTSSTGSP

SEQ ID NO: 446 - DNA, 108 bp, Artificial Sequence
  Description of Artificial Sequence: Synthetic polynucleotide
ggtagctctactccgtctggtgcaaccggctccccaggttctagcccgtctgcttccactggtactggcccaggtgcttccccgggcaccagctctactggttctcca

SEQ ID NO: 447 - protein, 36 aa, Artificial Sequence
  Description of Artificial Sequence: Synthetic polypeptide
GSSTPSGATGSPGSSTPSGATGSPGTPGSGTASSSP

SEQ ID NO: 448 - DNA, 108 bp, Artificial Sequence
  Description of Artificial Sequence: Synthetic polynucleotide
ggtagctctactccttctggtgctaccggttccccaggtagctctactccttctggtgctactggttccccaggtactccgggcagcggtactgcttcttcctctcca

SEQ ID NO: 449 - protein, 36 aa, Artificial Sequence
  Description of Artificial Sequence: Synthetic polypeptide
GSSTPSGATGSPGSSTPSGATGSPGASPGTSSTGSP

SEQ ID NO: 450 - DNA, 108 bp, Artificial Sequence
  Description of Artificial Sequence: Synthetic polynucleotide
ggtagctctactccgtctggtgcaaccggttccccaggtagctctactccttctggtgctactggctccccaggtgcatcccctggcaccagctctaccggttctcca

SEQ ID NO: 451 - protein, 36 aa, Artificial Sequence
  Description of Artificial Sequence: Synthetic polypeptide
GTPGSGTASSSPGSSPSASTGTGPGSSTPSGATGSP

SEQ ID NO: 452 - DNA, 108 bp, Artificial Sequence
  Description of Artificial Sequence: Synthetic polynucleotide
ggtactcctggtagcggtaccgcatcttcctctccaggttctagcccttctgcatctaccggtaccggtccaggtagctctactccttctggtgctactggctctcca

SEQ ID NO: 453 - protein, 36 aa, Artificial Sequence
  Description of Artificial Sequence: Synthetic polypeptide
GASPGTSSTGSPGSSPSASTGTGPGTPGSGTASSSP

SEQ ID NO: 454 - DNA, 108 bp, Artificial Sequence
  Description of Artificial Sequence: Synthetic polynucleotide
ggtgcttccccgggcactagctctaccggttctccaggttctagcccttctgcatctactggtactggcccaggtactccgggcagcggtactgcttcttcctctcca

SEQ ID NO: 455 - protein, 36 aa, Artificial Sequence; identical to SEQ ID NO: 449
  Description of Artificial Sequence: Synthetic polypeptide

SEQ ID NO: 456 - DNA, 108 bp, Artificial Sequence
  Description of Artificial Sequence: Synthetic polynucleotide
ggtagctctactccgtctggtgctaccggctctccaggtagctctaccccttctggtgcaaccggctccccaggtgcttctccgggtaccagctctactggttctcca

SEQ ID NO: 457 - protein, 36 aa, Artificial Sequence
  Description of Artificial Sequence: Synthetic polypeptide
GTPGSGTASSSPGSSTPSGATGSPGSSPSASTGTGP

SEQ ID NO: 458 - DNA, 108 bp, Artificial Sequence
  Description of Artificial Sequence: Synthetic polynucleotide
ggtacccctggcagcggtaccgcttcttcctctccaggtagctctaccccgtctggtgctactggctctccaggttctagcccgtctgcatctaccggtaccggccca

SEQ ID NO: 459 - protein, 36 aa, Artificial Sequence
  Description of Artificial Sequence: Synthetic polypeptide
GSSTPSGATGSPGTPGSGTASSSPGTPGSGTASSSP

SEQ ID NO: 460 - DNA, 108 bp, Artificial Sequence
  Description of Artificial Sequence: Synthetic polynucleotide
ggtagctctactccttctggtgcaaccggctccccaggtaccccgggcagcggtaccgcatcttcctctccaggtactccgggtagcggtactgcttcttcttctcca

SEQ ID NO: 461 - protein, 36 aa, Artificial Sequence; identical to SEQ ID NO: 435
  Description of Artificial Sequence: Synthetic polypeptide

SEQ ID NO: 462 - DNA, 108 bp, Artificial Sequence
  Description of Artificial Sequence: Synthetic polynucleotide
ggtaccccgggtagcggtactgcttcttcctctccaggtagctctaccccttctggtgcaaccggctctccaggtgcttctccgggcaccagctctaccggttctcca

SEQ ID NO: 463 - protein, 36 aa, Artificial Sequence; identical to SEQ ID NO: 449
  Description of Artificial Sequence: Synthetic polypeptide

SEQ ID NO: 464 - DNA, 108 bp, Artificial Sequence
  Description of Artificial Sequence: Synthetic polynucleotide
ggtagctctaccccgtctggtgctaccggctctccaggtagctctaccccgtctggtgcaaccggctccccaggtgcatccccgggtactagctctaccggttctcca

SEQ ID NO: 465 - protein, 36 aa, Artificial Sequence; identical to SEQ ID NO: 429
  Description of Artificial Sequence: Synthetic polypeptide

SEQ ID NO: 466 - DNA, 108 bp, Artificial Sequence
  Description of Artificial Sequence: Synthetic polynucleotide
ggtgcttctccgggcaccagctctactggttctccaggtaccccgggcagcggtaccgcatcttcttctccaggtagctctactccttctggtgcaactggttctcca

SEQ ID NO: 467 - protein, 36 aa, Artificial Sequence
  Description of Artificial Sequence: Synthetic polypeptide
GSSPSASTGTGPGSSTPSGATGSPGTPGSGTASSSP

SEQ ID NO: 468 - DNA, 108 bp, Artificial Sequence
  Description of Artificial Sequence: Synthetic polynucleotide
ggttctagcccgtctgcttccaccggtactggcccaggtagctctaccccgtctggtgcaactggttccccaggtacccctggtagcggtaccgcttcttcttctcca

SEQ ID NO: 469 - protein, 36 aa, Artificial Sequence; identical to SEQ ID NO: 433
  Description of Artificial Sequence: Synthetic polypeptide

SEQ ID NO: 470 - DNA, 108 bp, Artificial Sequence
  Description of Artificial Sequence: Synthetic polynucleotide
ggtgcttctccgggcaccagctctactggttctccaggttctagcccttctgcatccaccggtaccggtccaggtagctctaccccttctggtgcaaccggctctcca

SEQ ID NO: 471 - protein, 36 aa, Artificial Sequence
  Description of Artificial Sequence: Synthetic polypeptide
GASPGTSSTGSPGSSTPSGATGSPGSSTPSGATGSP

SEQ ID NO: 472 - DNA, 108 bp, Artificial Sequence
  Description of Artificial Sequence: Synthetic polynucleotide
ggtgcatccccgggcaccagctctaccggttctccaggtagctctaccccgtctggtgctaccggctctccaggtagctctaccccgtctggtgctactggctctcca

SEQ ID NO: 473 - protein, 36 aa, Artificial Sequence
  Description of Artificial Sequence: Synthetic polypeptide
GTPGSGTASSSPGSSTPSGATGSPGTPGSGTASSSP

SEQ ID NO: 474 - DNA, 108 bp, Artificial Sequence
  Description of Artificial Sequence: Synthetic polynucleotide
ggtacccctggtagcggtactgcttcttcctctccaggtagctctactccgtctggtgctaccggttctccaggtaccccgggtagcggtaccgcatcttcttctcca

SEQ ID NO: 475 - protein, 36 aa, Artificial Sequence; identical to SEQ ID NO: 361
  Description of Artificial Sequence: Synthetic polypeptide

SEQ ID NO: 476 - DNA, 108 bp, Artificial Sequence
  Description of Artificial Sequence: Synthetic polynucleotide
ggttctagcccttctgcttccaccggtactggcccaggtagctctaccccttctggtgctaccggctccccaggtagctctactccttctggtgcaactggctctcca

SEQ ID NO: 477 - protein, 36 aa, Artificial Sequence
  Description of Artificial Sequence: Synthetic polypeptide
GASPGTSSTGSPGSSPSASTGTGPGSSPSASTGTGP

SEQ ID NO: 478 - DNA, 108 bp, Artificial Sequence
  Description of Artificial Sequence: Synthetic polynucleotide
ggtgcttctcctggcaccagctctactggttctccaggttctagcccttctgcttctaccggtactggtccaggttctagcccttctgcatccactggtactggtcca

SEQ ID NO: 479 - protein, 36 aa, Artificial Sequence
  Description of Artificial Sequence: Synthetic polypeptide
GTPGSGTASSSPGASPGTSSTGSPGASPGTSSTGSP

SEQ ID NO: 480 - DNA, 108 bp, Artificial Sequence
  Description of Artificial Sequence: Synthetic polynucleotide
ggtactcctggcagcggtaccgcttcttcttctccaggtgcttctcctggtactagctctactggttctccaggtgcttctccgggcactagctctactggttctcca

SEQ ID NO: 481 - protein, 36 aa, Artificial Sequence
  Description of Artificial Sequence: Synthetic polypeptide
GSSTPSGATGSPGASPGTSSTGSPGSSTPSGATGSP

SEQ ID NO: 482 - DNA, 108 bp, Artificial Sequence
  Description of Artificial Sequence: Synthetic polynucleotide
ggtagctctaccccgtctggtgctaccggttccccaggtgcttctcctggtactagctctaccggttctccaggtagctctaccccgtctggtgctactggctctcca

SEQ ID NO: 483 - protein, 36 aa, Artificial Sequence
  Description of Artificial Sequence: Synthetic polypeptide
GSSTPSGATGSPGTPGSGTASSSPGSSTPSGATGSP

SEQ ID NO: 484 - DNA, 108 bp, Artificial Sequence
  Description of Artificial Sequence: Synthetic polynucleotide
ggtagctctaccccgtctggtgctactggttctccaggtactccgggcagcggtactgcttcttcctctccaggtagctctaccccttctggtgctactggctctcca

SEQ ID NO: 485 - protein, 36 aa, Artificial Sequence; identical to SEQ ID NO: 433
  Description of Artificial Sequence: Synthetic polypeptide

SEQ ID NO: 486 - DNA, 108 bp, Artificial Sequence
  Description of Artificial Sequence: Synthetic polynucleotide
ggtgcatctcctggtaccagctctactggttctccaggttctagcccttctgcttctaccggtaccggtccaggtagctctactccttctggtgctaccggttctcca

SEQ ID NO: 487 - protein, 36 aa, Artificial Sequence
  Description of Artificial Sequence: Synthetic polypeptide
GSSTPSGATGSPGSSTPSGATGSPGSSTPSGATGSP

SEQ ID NO: 488 - DNA, 108 bp, Artificial Sequence
  Description of Artificial Sequence: Synthetic polynucleotide
ggtagctctaccccgtctggtgctactggctctccaggtagctctactccttctggtgctactggttccccaggtagctctaccccgtctggtgcaactggctctcca

SEQ ID NO: 489 - protein, 36 aa, Artificial Sequence
  Description of Artificial Sequence: Synthetic polypeptide
GASPGTSSTGSPGTPGSGTASSSPGASPGTSSTGSP

SEQ ID NO: 490 - DNA, 108 bp, Artificial Sequence
  Description of Artificial Sequence: Synthetic polynucleotide
ggtgcatccccgggtaccagctctaccggttctccaggtactcctggcagcggtactgcatcttcctctccaggtgcttctccgggcaccagctctactggttctcca

SEQ ID NO: 491 - protein, 36 aa, Artificial Sequence; identical to SEQ ID NO: 445
  Description of Artificial Sequence: Synthetic polypeptide

SEQ ID NO: 492 - DNA, 108 bp, Artificial Sequence
  Description of Artificial Sequence: Synthetic polynucleotide
ggtagctctactccttctggtgcaactggttctccaggttctagcccgtctgcatccactggtaccggtccaggtgcttcccctggcaccagctctaccggttctcca

SEQ ID NO: 493 - protein, 36 aa, Artificial Sequence
  Description of Artificial Sequence: Synthetic polypeptide
GASPGTSSTGSPGSSTPSGATGSPGSSPSASTGTGP

SEQ ID NO: 494 - DNA, 108 bp, Artificial Sequence
  Description of Artificial Sequence: Synthetic polynucleotide
ggtgcatctcctggtactagctctactggttctccaggtagctctactccgtctggtgcaaccggctctccaggttctagcccttctgcatctaccggtactggtcca

SEQ ID NO: 495 - protein, 36 aa, Artificial Sequence; identical to SEQ ID NO: 435
  Description of Artificial Sequence: Synthetic polypeptide

SEQ ID NO: 496 - DNA, 108 bp, Artificial Sequence
  Description of Artificial Sequence: Synthetic polynucleotide
ggtactcctggcagcggtaccgcatcttcctctccaggtagctctactccgtctggtgcaactggttccccaggtgcttctccgggtaccagctctaccggttctcca

SEQ ID NO: 497 - protein, 36 aa, Artificial Sequence; identical to SEQ ID NO: 483
  Description of Artificial Sequence: Synthetic polypeptide

SEQ ID NO: 498 - DNA, 108 bp, Artificial Sequence
  Description of Artificial Sequence: Synthetic polynucleotide
ggtagctctaccccgtctggtgcaaccggctccccaggtactcctggtagcggtaccgcttcttcttctccaggtagctctactccgtctggtgctaccggctcccca

SEQ ID NO: 499 - protein, 36 aa, Artificial Sequence
  Description of Artificial Sequence: Synthetic polypeptide
GSSPSASTGTGPGSSPSASTGTGPGASPGTSSTGSP

SEQ ID NO: 500 - DNA, 108 bp, Artificial Sequence
  Description of Artificial Sequence: Synthetic polynucleotide
ggttctagcccttctgcatccaccggtaccggcccaggttctagcccgtctgcttctaccggtactggtccaggtgcttctccgggtactagctctactggttctcca

SEQ ID NO: 501 - protein, 36 aa, Artificial Sequence
  Description of Artificial Sequence: Synthetic polypeptide
GTPGSGTASSSPGSSTPSGATGSPGSNPSASTGTGP

SEQ ID NO: 502 - DNA, 108 bp, Artificial Sequence
  Description of Artificial Sequence: Synthetic polynucleotide
ggtaccccgggtagcggtaccgcttcttcttctccaggtagctctactccgtctggtgctaccggctctccaggttctaacccttctgcatccaccggtaccggccca

SEQ ID NO: 503 - protein, 36 aa, Artificial Sequence
  Description of Artificial Sequence: Synthetic polypeptide
GSSPSASTGTGPGSSTPSGATGSPGASPGTSSTGSP

SEQ ID NO: 504 - DNA, 108 bp, Artificial Sequence
  Description of Artificial Sequence: Synthetic polynucleotide
ggttctagcccttctgcatctactggtactggcccaggtagctctactccttctggtgctaccggctctccaggtgcttctccgggtactagctctaccggttctcca

SEQ ID NO: 505 - protein, 36 aa, Artificial Sequence
  Description of Artificial Sequence: Synthetic polypeptide
GSSTPSGATGSPGASPGTSSTGSPGTPGSGTASSSP

SEQ ID NO: 506 - DNA, 108 bp, Artificial Sequence
  Description of Artificial Sequence: Synthetic polynucleotide
ggtagctctaccccttctggtgcaaccggctctccaggtgcatccccgggtaccagctctaccggttctccaggtactccgggtagcggtaccgcttcttcctctcca

SEQ ID NO: 507 - protein, 36 aa, Artificial Sequence; identical to SEQ ID NO: 487
  Description of Artificial Sequence: Synthetic polypeptide

SEQ ID NO: 508 - DNA, 108 bp, Artificial Sequence
  Description of Artificial Sequence: Synthetic polynucleotide
ggtagctctactccgtctggtgcaaccggttccccaggtagctctaccccttctggtgcaaccggctccccaggtagctctaccccttctggtgcaactggctctcca

SEQ ID NO: 509 - protein, 36 aa, Artificial Sequence; identical to SEQ ID NO: 429
  Description of Artificial Sequence: Synthetic polypeptide

SEQ ID NO: 510 - DNA, 108 bp, Artificial Sequence
  Description of Artificial Sequence: Synthetic polynucleotide
ggtgcttctcctggcactagctctaccggttctccaggtacccctggtagcggtaccgcatcttcctctccaggtagctctactccttctggtgctactggttcccca

SEQ ID NO: 511 - protein, 36 aa, Artificial Sequence
  Description of Artificial Sequence: Synthetic polypeptide
GSSTPSGATGSPGSSPSASTGTGPGSSPSASTGTGP

SEQ ID NO: 512 - DNA, 108 bp, Artificial Sequence
  Description of Artificial Sequence: Synthetic polynucleotide
ggtagctctaccccgtctggtgctactggctccccaggttctagcccttctgcatccaccggtaccggtccaggttctagcccgtctgcatctactggtactggtcca

SEQ ID NO: 513 - protein, 36 aa, Artificial Sequence; identical to SEQ ID NO: 477
  Description of Artificial Sequence: Synthetic polypeptide

SEQ ID NO: 514 - DNA, 108 bp, Artificial Sequence
  Description of Artificial Sequence: Synthetic polynucleotide
ggtgcttccccgggcaccagctctactggttctccaggttctagcccgtctgcttctactggtactggtccaggttctagcccttctgcttccactggtactggtcca

SEQ ID NO: 515 - protein, 36 aa, Artificial Sequence; identical to SEQ ID NO: 453
  Description of Artificial Sequence: Synthetic polypeptide

SEQ ID NO: 516 - DNA, 108 bp, Artificial Sequence
  Description of Artificial Sequence: Synthetic polynucleotide
ggtgcttccccgggtaccagctctaccggttctccaggttctagcccttctgcttctaccggtaccggtccaggtacccctggcagcggtaccgcatcttcctctcca

SEQ ID NO: 517 - DNA, 432 bp, Artificial Sequence
  Description of Artificial Sequence: Synthetic polynucleotide
ggtaccccgggcagcggtaccgcatcttcctctccaggtagctctaccccgtctggtgctaccggttccccaggtagctctaccccgtctggtgcaaccggctccccaggtagcccggctggctctcctacctctactgaggaaggtacttctgaaagcgctactcctgagtctggtccaggtacctctactgaaccgtccgaaggtagcgctccaggttctagcccttctgcatccaccggtaccggcccaggttctagcccgtctgcttctaccggtactggtccaggtgcttctccgggtactagctctactggttctccaggtacctctaccgaaccgtccgagggtagcgcaccaggtacctctactgaaccgtctgagggtagcgctccaggtagcgaaccggcaacctccggttctgaaactcca

SEQ ID NO: 518 - protein, 144 aa, Artificial Sequence
  Description of Artificial Sequence: Synthetic polypeptide
GTPGSGTASSSPGSSTPSGATGSPGSSTPSGATGSPGSPAGSPTSTEEGTSESATPESGPGTSTEPSEGSAPGSSPSASTGTGPGSSPSASTGTGPGASPGTSSTGSPGTSTEPSEGSAPGTSTEPSEGSAPGSEPATSGSETP

SEQ ID NO: 519 - DNA, 432 bp, Artificial Sequence
  Description of Artificial Sequence: Synthetic polynucleotide
ggttctaccagcgaatccccttctggcactgcaccaggttctactagcgaatccccttctggtaccgcaccaggtacttctccgagcggcgaatcttctactgctccaggtacctctactgaaccttccgaaggcagcgctccaggtacctctaccgaaccgtccgagggcagcgcaccaggtacttctgaaagcgcaacccctgaatccggtccaggtgcatctcctggtaccagctctaccggttctccaggtagctctactccttctggtgctactggctctccaggtgcttccccgggtaccagctctaccggttctccaggttctactagcgaatctccttctggcactgcaccaggttctaccagcgaatctccgtctggcactgcaccaggtacctctacccctgaaagcggttccgcttctcca

SEQ ID NO: 520 - protein, 144 aa, Artificial Sequence
  Description of Artificial Sequence: Synthetic polypeptide
GSTSESPSGTAPGSTSESPSGTAPGTSPSGESSTAPGTSTEPSEGSAPGTSTEPSEGSAPGTSESATPESGPGASPGTSSTGSPGSSTPSGATGSPGASPGTSSTGSPGSTSESPSGTAPGSTSESPSGTAPGTSTPESGSASP

SEQ ID NO: 521 - DNA, 432 bp, Artificial Sequence
  Description of Artificial Sequence: Synthetic polynucleotide
ggtacttctaccgaaccttccgagggcagcgcaccaggtacttctgaaagcgctacccctgagtccggcccaggtacttctgaaagcgctactcctgaatccggtccaggtacctctactgaaccttctgagggcagcgctccaggtacttctgaaagcgctaccccggagtccggtccaggtacttctactgaaccgtccgaaggtagcgcaccaggtacttctactgaaccttccgaaggtagcgctccaggtagcgaacctgctacttctggttctgaaaccccaggtagcccggctggctctccgacctccaccgaggaaggtgcttctcctggcaccagctctactggttctccaggttctagcccttctgcttctaccggtactggtccaggttctagcccttctgcatccactggtactggtcca

SEQ ID NO: 522 - protein, 144 aa, Artificial Sequence
  Description of Artificial Sequence: Synthetic polypeptide
GTSTEPSEGSAPGTSESATPESGPGTSESATPESGPGTSTEPSEGSAPGTSESATPESGPGTSTEPSEGSAPGTSTEPSEGSAPGSEPATSGSETPGSPAGSPTSTEEGASPGTSSTGSPGSSPSASTGTGPGSSPSASTGTGP

SEQ ID NO: 523 - DNA, 432 bp, Artificial Sequence
  Description of Artificial Sequence: Synthetic polynucleotide
ggtagcgaaccggcaacctctggctctgaaaccccaggtacctctgaaagcgctactccggaatctggtccaggtacttctgaaagcgctactccggaatccggtccaggttctaccagcgaatctccttctggcaccgctccaggttctactagcgaatccccgtctggtaccgcaccaggtacttctcctagcggcgaatcttctaccgcaccaggtgcatctccgggtactagctctaccggttctccaggttctagcccttctgcttccactggtaccggcccaggtagctctaccccgtctggtgctactggttccccaggtagctctactccgtctggtgcaaccggttccccaggtagctctactccttctggtgctactggctccccaggtgcatcccctggcaccagctctaccggttctcca

SEQ ID NO: 524 - protein, 144 aa, Artificial Sequence
  Description of Artificial Sequence: Synthetic polypeptide
GSEPATSGSETPGTSESATPESGPGTSESATPESGPGSTSESPSGTAPGSTSESPSGTAPGTSPSGESSTAPGASPGTSSTGSPGSSPSASTGTGPGSSTPSGATGSPGSSTPSGATGSPGSSTPSGATGSPGASPGTSSTGSP

SEQ ID NO: 525 - DNA, 432 bp, Artificial Sequence
  Description of Artificial Sequence: Synthetic polynucleotide
ggtgcttctccgggcaccagctctactggttctccaggttctagcccttctgcatccaccggtaccggtccaggtagctctaccccttctggtgcaaccggctctccaggtacttctgaaagcgctaccccggaatctggcccaggtagcgaaccggctacttctggttctgaaaccccaggtagcgaaccggctacctccggttctgaaactccaggtacttctgaaagcgctactccggagtccggtccaggtacctctaccgaaccgtccgaaggcagcgctccaggtacttctactgaaccttctgagggtagcgctccaggtacctctaccgaaccgtccgagggtagcgcaccaggtacctctactgaaccgtctgagggtagcgctccaggtagcgaaccggcaacctccggttctgaaactcca

SEQ ID NO: 526 - protein, 144 aa, Artificial Sequence
  Description of Artificial Sequence: Synthetic polypeptide
GASPGTSSTGSPGSSPSASTGTGPGSSTPSGATGSPGTSESATPESGPGSEPATSGSETPGSEPATSGSETPGTSESATPESGPGTSTEPSEGSAPGTSTEPSEGSAPGTSTEPSEGSAPGTSTEPSEGSAPGSEPATSGSETP

SEQ ID NO: 527 - DNA, 432 bp, Artificial Sequence
  Description of Artificial Sequence: Synthetic polynucleotide
ggtacctctaccgaaccttccgaaggtagcgctccaggtagcccggcaggttctcctacttccactgaggaaggtacttctaccgaaccttctgagggtagcgcaccaggtacctctgaaagcgcaactcctgagtctggcccaggtagcgaacctgctacctccggctctgagactccaggtacctctgaaagcgcaaccccggaatctggtccaggtagcccggctggctctcctacctctactgaggaaggtacttctgaaagcgctactcctgagtctggtccaggtacctctactgaaccgtccgaaggtagcgctccaggtagcgaacctgctacttctggttctgaaactccaggtacttctaccgaaccgtccgagggtagcgctccaggtagcgaacctgctacttctggttctgaaactcca

SEQ ID NO: 528 - protein, 144 aa, Artificial Sequence
  Description of Artificial Sequence: Synthetic polypeptide
GTSTEPSEGSAPGSPAGSPTSTEEGTSTEPSEGSAPGTSESATPESGPGSEPATSGSETPGTSESATPESGPGSPAGSPTSTEEGTSESATPESGPGTSTEPSEGSAPGSEPATSGSETPGTSTEPSEGSAPGSEPATSGSETP

SEQ ID NO: 529 - DNA, 432 bp, Artificial Sequence
  Description of Artificial Sequence: Synthetic polynucleotide
ggtacttctaccgaaccgtccgaaggcagcgctccaggtacctctactgaaccttccgagggcagcgctccaggtacctctaccgaaccttctgaaggtagcgcaccaggtacttctaccgaaccgtccgaaggcagcgctccaggtacctctactgaaccttccgagggcagcgctccaggtacctctaccgaaccttctgaaggtagcgcaccaggtacttctaccgaaccttccgagggcagcgcaccaggtacttctgaaagcgctacccctgagtccggcccaggtacttctgaaagcgctactcctgaatccggtccaggtacttctactgaaccttccgaaggtagcgctccaggtagcgaacctgctacttctggttctgaaaccccaggtagcccggctggctctccgacctccaccgaggaa

SEQ ID NO: 530 - protein, 144 aa, Artificial Sequence
  Description of Artificial Sequence: Synthetic polypeptide
GTSTEPSEGSAPGTSTEPSEGSAPGTSTEPSEGSAPGTSTEPSEGSAPGTSTEPSEGSAPGTSTEPSEGSAPGTSTEPSEGSAPGTSESATPESGPGTSESATPESGPGTSTEPSEGSAPGSEPATSGSETPGSPAGSPTSTEE

SEQ ID NO: 531 - DNA, 432 bp, Artificial Sequence
  Description of Artificial Sequence: Synthetic polynucleotide
ggtacttctaccgaaccgtccgagggcagcgctccaggtacttctactgaaccttctgaaggcagcgctccaggtacttctactgaaccttccgaaggtagcgcaccaggttctaccagcgaatccccttctggtactgctccaggttctaccagcgaatccccttctggcaccgcaccaggtacttctacccctgaaagcggctccgcttctccaggtagcgaacctgcaacctctggctctgaaaccccaggtacctctgaaagcgctactcctgaatctggcccaggtacttctactgaaccgtccgagggcagcgcaccaggtacttctactgaaccgtctgaaggtagcgcaccaggtacttctgaaagcgcaaccccggaatccggcccaggtacctctgaaagcgcaaccccggagtccggccca

SEQ ID NO: 532 - protein, 144 aa, Artificial Sequence
  Description of Artificial Sequence: Synthetic polypeptide
GTSTEPSEGSAPGTSTEPSEGSAPGTSTEPSEGSAPGSTSESPSGTAPGSTSESPSGTAPGTSTPESGSASPGSEPATSGSETPGTSESATPESGPGTSTEPSEGSAPGTSTEPSEGSAPGTSESATPESGPGTSESATPESGP

SEQ ID NO: 533 - DNA, 432 bp, Artificial Sequence
  Description of Artificial Sequence: Synthetic polynucleotide
ggtagctctaccccttctggtgctaccggctctccaggttctagcccgtctgcttctaccggtaccggtccaggtagctctaccccttctggtgctactggttctccaggtagccctgctggctctccgacttctactgaggaaggtagcccggctggttctccgacttctactgaggaaggtacttctaccgaaccttccgaaggtagcgctccaggtgcttccccgggcactagctctaccggttctccaggttctagcccttctgcatctactggtactggcccaggtactccgggcagcggtactgcttcttcctctccaggttctactagctctactgctgaatctcctggcccaggtacttctcctagcggtgaatcttctaccgctccaggtacctctactccggaaagcggttctgcatctcca

SEQ ID NO: 534 - protein, 144 aa, Artificial Sequence
  Description of Artificial Sequence: Synthetic polypeptide
GSSTPSGATGSPGSSPSASTGTGPGSSTPSGATGSPGSPAGSPTSTEEGSPAGSPTSTEEGTSTEPSEGSAPGASPGTSSTGSPGSSPSASTGTGPGTPGSGTASSSPGSTSSTAESPGPGTSPSGESSTAPGTSTPESGSASP

SEQ ID NO: 535 - DNA, 432 bp, Artificial Sequence
  Description of Artificial Sequence: Synthetic polynucleotide
ggtacctctactgaaccttctgagggcagcgctccaggtacttctgaaagcgctaccccggagtccggtccaggtacttctactgaaccgtccgaaggtagcgcaccaggtacttctactgaaccgtctgaaggtagcgcaccaggtacttctgaaagcgcaaccccggaatccggcccaggtacctctgaaagcgcaaccccggagtccggcccaggtactcctggcagcggtaccgcttcttcttctccaggtgcttctcctggtactagctctactggttctccaggtgcttctccgggcactagctctactggttctccaggtagccctgctggctctccgacttctactgaggaaggtagcccggctggttctccgacttctactgaggaaggtacttctaccgaaccttccgaaggtagcgctcca

SEQ ID NO: 536 - protein, 144 aa, Artificial Sequence
  Description of Artificial Sequence: Synthetic polypeptide
GTSTEPSEGSAPGTSESATPESGPGTSTEPSEGSAPGTSTEPSEGSAPGTSESATPESGPGTSESATPESGPGTPGSGTASSSPGASPGTSSTGSPGASPGTSSTGSPGSPAGSPTSTEEGSPAGSPTSTEEGTSTEPSEGSAP

SEQ ID NO: 537 - DNA, 432 bp, Artificial Sequence
  Description of Artificial Sequence: Synthetic polynucleotide
ggtagcccagcaggctctccgacttccactgaggaaggtacttctactgaaccttccgaaggcagcgcaccaggtacctctactgaaccttctgagggcagcgctccaggtacctctaccgaaccgtctgaaggtagcgcaccaggtacctctgaaagcgcaactcctgagtccggtccaggtacttctgaaagcgcaaccccggagtctggcccaggtaccccgggtagcggtactgcttcttcctctccaggtagctctaccccttctggtgcaaccggctctccaggtgcttctccgggcaccagctctaccggttctccaggtacctctactgaaccttctgagggcagcgctccaggtacttctgaaagcgctaccccggagtccggtccaggtacttctactgaaccgtccgaaggtagcgcacca

SEQ ID NO: 538 - protein, 144 aa, Artificial Sequence
  Description of Artificial Sequence: Synthetic polypeptide
GSPAGSPTSTEEGTSTEPSEGSAPGTSTEPSEGSAPGTSTEPSEGSAPGTSESATPESGPGTSESATPESGPGTPGSGTASSSPGSSTPSGATGSPGASPGTSSTGSPGTSTEPSEGSAPGTSESATPESGPGTSTEPSEGSAP

SEQ ID NO: 539 - DNA, 432 bp, Artificial Sequence
  Description of Artificial Sequence: Synthetic polynucleotide
ggtagcgaaccggcaacctccggctctgaaactccaggtacttctgaaagcgctactccggaatccggcccaggtagcgaaccggctacttccggctctgaaaccccaggtagctctaccccgtctggtgcaaccggctccccaggtactcctggtagcggtaccgcttcttcttctccaggtagctctactccgtctggtgctaccggctccccaggtgcatctcctggtaccagctctaccggttctccaggtagctctactccttctggtgctactggctctccaggtgcttccccgggtaccagctctaccggttctccaggtagcgaacctgctacttctggttctgaaactccaggtacttctaccgaaccgtccgagggtagcgctccaggtagcgaacctgctacttctggttctgaaactcca

SEQ ID NO: 540 - protein, 144 aa, Artificial Sequence
  Description of Artificial Sequence: Synthetic polypeptide
GSEPATSGSETPGTSESATPESGPGSEPATSGSETPGSSTPSGATGSPGTPGSGTASSSPGSSTPSGATGSPGASPGTSSTGSPGSSTPSGATGSPGASPGTSSTGSPGSEPATSGSETPGTSTEPSEGSAPGSEPATSGSETP

SEQ ID NO: 541 - DNA, 432 bp, Artificial Sequence
  Description of Artificial Sequence: Synthetic polynucleotide
ggtacctctactgaaccttccgaaggcagcgctccaggtacctctaccgaaccgtccgagggcagcgcaccaggtacttctgaaagcgcaacccctgaatccggtccaggtagccctgctggctctccgacttctactgaggaaggtagcccggctggttctccgacttctactgaggaaggtacttctaccgaaccttccgaaggtagcgctccaggtagcccggctggttctccgacttccaccgaggaaggtacctctactgaaccttctgagggtagcgctccaggtacctctactgaaccttccgaaggcagcgctccaggtgcttccccgggcaccagctctactggttctccaggttctagcccgtctgcttctactggtactggtccaggttctagcccttctgcttccactggtactggtcca

SEQ ID NO: 542 - protein, 144 aa, Artificial Sequence
  Description of Artificial Sequence: Synthetic polypeptide
GTSTEPSEGSAPGTSTEPSEGSAPGTSESATPESGPGSPAGSPTSTEEGSPAGSPTSTEEGTSTEPSEGSAPGSPAGSPTSTEEGTSTEPSEGSAPGTSTEPSEGSAPGASPGTSSTGSPGSSPSASTGTGPGSSPSASTGTGP

SEQ ID NO: 543 - DNA, 432 bp, Artificial Sequence
  Description of Artificial Sequence: Synthetic polynucleotide
ggtagctctaccccgtctggtgctaccggttccccaggtgcttctcctggtactagctctaccggttctccaggtagctctaccccgtctggtgctactggctctccaggtagccctgctggctctccaacctccaccgaagaaggtacctctgaaagcgcaacccctgaatccggcccaggtagcgaaccggcaacctccggttctgaaaccccaggtgcatctcctggtactagctctactggttctccaggtagctctactccgtctggtgcaaccggctctccaggttctagcccttctgcatctaccggtactggtccaggttctaccagcgaatccccttctggtactgctccaggttctaccagcgaatccccttctggcaccgcaccaggtacttctacccctgaaagcggctccgcttctcca

SEQ ID NO: 544 - protein, 144 aa, Artificial Sequence
  Description of Artificial Sequence: Synthetic polypeptide
GSSTPSGATGSPGASPGTSSTGSPGSSTPSGATGSPGSPAGSPTSTEEGTSESATPESGPGSEPATSGSETPGASPGTSSTGSPGSSTPSGATGSPGSSPSASTGTGPGSTSESPSGTAPGSTSESPSGTAPGTSTPESGSASP

SEQ ID NO: 545 - DNA, 432 bp, Artificial Sequence
  Description of Artificial Sequence: Synthetic polynucleotide
ggttctaccagcgaatctccttctggcaccgctccaggttctactagcgaatccccgtctggtaccgcaccaggtacttctcctagcggcgaatcttctaccgcaccaggtacctctgaaagcgctactccggagtctggcccaggtacctctactgaaccgtctgagggtagcgctccaggtacttctactgaaccgtccgaaggtagcgcaccaggtacctctactgaaccttctgagggcagcgctccaggtacttctgaaagcgctaccccggagtccggtccaggtacttctactgaaccgtccgaaggtagcgcaccaggtagctctaccccgtctggtgctaccggttccccaggtgcttctcctggtactagctctaccggttctccaggtagctctaccccgtctggtgctactggctctcca

SEQ ID NO: 546 - protein, 144 aa, Artificial Sequence
  Description of Artificial Sequence: Synthetic polypeptide
GSTSESPSGTAPGSTSESPSGTAPGTSPSGESSTAPGTSESATPESGPGTSTEPSEGSAPGTSTEPSEGSAPGTSTEPSEGSAPGTSESATPESGPGTSTEPSEGSAPGSSTPSGATGSPGASPGTSSTGSPGSSTPSGATGSP

SEQ ID NO: 547 - DNA, 432 bp, Artificial Sequence
  Description of Artificial Sequence: Synthetic polynucleotide
ggttctactagctctactgcagaatctccgggcccaggtacctctcctagcggtgaatcttctaccgctccaggtacttctccgagcggtgaatcttctaccgctccaggttctactagctctaccgctgaatctccgggtccaggttctaccagctctactgcagaatctcctggcccaggtacttctactccggaaagcggttccgcttctccaggtacttctcctagcggtgaatcttctaccgctccaggttctaccagctctactgctgaatctcctggcccaggtacttctaccccggaaagcggctccgcttctccaggttctaccagctctaccgctgaatctcctggcccaggttctactagcgaatctccgtctggcaccgcaccaggtacttcccctagcggtgaatcttctactgcacca

SEQ ID NO: 548 - protein, 144 aa, Artificial Sequence
  Description of Artificial Sequence: Synthetic polypeptide
GSTSSTAESPGPGTSPSGESSTAPGTSPSGESSTAPGSTSSTAESPGPGSTSSTAESPGPGTSTPESGSASPGTSPSGESSTAPGSTSSTAESPGPGTSTPESGSASPGSTSSTAESPGPGSTSESPSGTAPGTSPSGESSTAP

SEQ ID NO: 549 - DNA, 432 bp, Artificial Sequence
  Description of Artificial Sequence: Synthetic polynucleotide
ggtacctctactccggaaagcggttccgcatctccaggttctaccagcgaatccccgtctggcaccgcaccaggttctactagctctactgctgaatctccgggcccaggtacctctactgaaccttccgaaggcagcgctccaggtacctctaccgaaccgtccgagggcagcgcaccaggtacttctgaaagcgcaacccctgaatccggtccaggtacctctgaaagcgctactccggagtctggcccaggtacctctactgaaccgtctgagggtagcgctccaggtacttctactgaaccgtccgaaggtagcgcaccaggtacttctgaaagcgctactccggagtccggtccaggtacctctaccgaaccgtccgaaggcagcgctccaggtacttctactgaaccttctgagggtagcgctccc

SEQ ID NO: 550 - protein, 144 aa, Artificial Sequence
  Description of Artificial Sequence: Synthetic polypeptide
GTSTPESGSASPGSTSESPSGTAPGSTSSTAESPGPGTSTEPSEGSAPGTSTEPSEGSAPGTSESATPESGPGTSESATPESGPGTSTEPSEGSAPGTSTEPSEGSAPGTSESATPESGPGTSTEPSEGSAPGTSTEPSEGSAP

SEQ ID NO: 551 - DNA, 432 bp, Artificial Sequence
  Description of Artificial Sequence: Synthetic polynucleotide
ggtacctctaccgaaccgtccgagggtagcgcaccaggtacctctactgaaccgtctgagggtagcgctccaggtagcgaaccggcaacctccggttctgaaactccaggtacttctactgaaccgtctgaaggtagcgcaccaggtacttctgaaagcgcaaccccggaatccggcccaggtacctctgaaagcgcaaccccggagtccggcccaggtgcatctccgggtactagctctaccggttctccaggttctagcccttctgcttccactggtaccggcccaggtagctctaccccgtctggtgctactggttccccaggtagctctactccgtctggtgcaaccggttccccaggtagctctactccttctggtgctactggctccccaggtgcatcccctggcaccagctctaccggttctcca

SEQ ID NO: 552 - protein, 144 aa, Artificial Sequence
  Description of Artificial Sequence: Synthetic polypeptide
GTSTEPSEGSAPGTSTEPSEGSAPGSEPATSGSETPGTSTEPSEGSAPGTSESATPESGPGTSESATPESGPGASPGTSSTGSPGSSPSASTGTGPGSSTPSGATGSPGSSTPSGATGSPGSSTPSGATGSPGASPGTSSTGSP

SEQ ID NO: 553 - DNA, 432 bp, Artificial Sequence
  Description of Artificial Sequence: Synthetic polynucleotide
ggtagcgaaccggcaacctctggctctgaaactccaggtagcgaacctgcaacctccggctctgaaaccccaggtacttctactgaaccttctgagggcagcgcaccaggtagcgaacctgcaacctctggctctgaaaccccaggtacctctgaaagcgctactcctgaatctggcccaggtacttctactgaaccgtccgagggcagcgcaccaggtagctctactccgtctggtgctaccggctctccaggtagctctaccccttctggtgcaaccggctccccaggtgcttctccgggtaccagctctactggttctccaggtagctctaccccgtctggtgctaccggttccccaggtgcttctcctggtactagctctaccggttctccaggtagctctaccccgtctggtgctactggctctcca

SEQ ID NO: 554 - protein, 144 aa, Artificial Sequence
  Description of Artificial Sequence: Synthetic polypeptide
GSEPATSGSETPGSEPATSGSETPGTSTEPSEGSAPGSEPATSGSETPGTSESATPESGPGTSTEPSEGSAPGSSTPSGATGSPGSSTPSGATGSPGASPGTSSTGSPGSSTPSGATGSPGASPGTSSTGSPGSSTPSGATGSP

SEQ ID NO: 555 - DNA, 432 bp, Artificial Sequence
  Description of Artificial Sequence: Synthetic polynucleotide
ggtacttctaccgaaccgtccgagggcagcgctccaggtacttctactgaaccttctgaaggcagcgctccaggtacttctactgaaccttccgaaggtagcgcaccaggtacttctgaaagcgctactccggagtccggtccaggtacctctaccgaaccgtccgaaggcagcgctccaggtacttctactgaaccttctgagggtagcgctccaggttctactagcgaatctccgtctggcactgctccaggtacttctcctagcggtgaatcttctaccgctccaggtacttcccctagcggcgaatcttctaccgctccaggtagcccggctggctctcctacctctactgaggaaggtacttctgaaagcgctactcctgagtctggtccaggtacctctactgaaccgtccgaaggtagcgctcca

SEQ ID NO: 556 - protein, 144 aa, Artificial Sequence
  Description of Artificial Sequence: Synthetic polypeptide
GTSTEPSEGSAPGTSTEPSEGSAPGTSTEPSEGSAPGTSESATPESGPGTSTEPSEGSAPGTSTEPSEGSAPGSTSESPSGTAPGTSPSGESSTAPGTSPSGESSTAPGSPAGSPTSTEEGTSESATPESGPGTSTEPSEGSAP

SEQ ID NO: 557 - DNA, 432 bp, Artificial Sequence
  Description of Artificial Sequence: Synthetic polynucleotide
ggtacttctactgaaccttccgaaggtagcgctccaggtagcgaacctgctacttctggttctgaaaccccaggtagcccggctggctctccgacctccaccgaggaaggtagcccggcaggctctccgacctctactgaggaaggtacttctgaaagcgcaaccccggagtccggcccaggtacctctaccgaaccgtctgagggcagcgcaccaggtacctctactgaaccttccgaaggcagcgctccaggtacctctaccgaaccgtccgagggcagcgcaccaggtacttctgaaagcgcaacccctgaatccggtccaggtagctctactccgtctggtgcaaccggctccccaggttctagcccgtctgcttccactggtactggcccaggtgcttccccgggcaccagctctactggttctcca

SEQ ID NO: 558 - protein, 144 aa, Artificial Sequence
  Description of Artificial Sequence: Synthetic polypeptide
GTSTEPSEGSAPGSEPATSGSETPGSPAGSPTSTEEGSPAGSPTSTEEGTSESATPESGPGTSTEPSEGSAPGTSTEPSEGSAPGTSTEPSEGSAPGTSESATPESGPGSSTPSGATGSPGSSPSASTGTGPGASPGTSSTGSP

SEQ ID NO: 559 - DNA, 432 bp, Artificial Sequence
  Description of Artificial Sequence: Synthetic polynucleotide
ggtagcgaaccggctacttccggctctgagactccaggtagccctgctggctctccgacctctaccgaagaaggtacctctgaaagcgctacccctgagtctggcccaggtacctctactgaaccttccgaaggcagcgctccaggtacctctaccgaaccgtccgagggcagcgcaccaggtacttctgaaagcgcaacccctgaatccggtccaggtacctctactccggaaagcggttccgcatctccaggttctaccagcgaatccccgtctggcaccgcaccaggttctactagctctactgctgaatctccgggcccaggtacttctgaaagcgctactccggagtccggtccaggtacctctaccgaaccgtccgaaggcagcgctccaggtacttctactgaaccttctgagggtagcgctcca

SEQ ID NO: 560 - protein, 144 aa, Artificial Sequence
  Description of Artificial Sequence: Synthetic polypeptide
GSEPATSGSETPGSPAGSPTSTEEGTSESATPESGPGTSTEPSEGSAPGTSTEPSEGSAPGTSESATPESGPGTSTPESGSASPGSTSESPSGTAPGSTSSTAESPGPGTSESATPESGPGTSTEPSEGSAPGTSTEPSEGSAP

SEQ ID NO: 561 - DNA, 432 bp, Artificial Sequence
  Description of Artificial Sequence: Synthetic polynucleotide
ggtacttctaccgaaccgtccgagggcagcgctccaggtacttctactgaaccttctgaaggcagcgctccaggtacttctactgaaccttccgaaggtagcgcaccaggtacctctaccgaaccgtctgaaggtagcgcaccaggtacctctgaaagcgcaactcctgagtccggtccaggtacttctgaaagcgcaaccccggagtctggcccaggtactcctggcagcggtaccgcatcttcctctccaggtagctctactccgtctggtgcaactggttccccaggtgcttctccgggtaccagctctaccggttctccaggttccaccagctctactgctgaatctcctggtccaggtacctctcctagcggtgaatcttctactgctccaggtacttctactcctgaaagcggctctgcttctcca

SEQ ID NO: 562 - protein, 144 aa, Artificial Sequence
  Description of Artificial Sequence: Synthetic polypeptide
GTSTEPSEGSAPGTSTEPSEGSAPGTSTEPSEGSAPGTSTEPSEGSAPGTSESATPESGPGTSESATPESGPGTPGSGTASSSPGSSTPSGATGSPGASPGTSSTGSPGSTSSTAESPGPGTSPSGESSTAPGTSTPESGSASP

SEQ ID NO: 563 - DNA, 432 bp, Artificial Sequence
  Description of Artificial Sequence: Synthetic polynucleotide
ggtagcccggcaggctctccgacctctactgaggaaggtacttctgaaagcgcaaccccggagtccggcccaggtacctctaccgaaccgtctgagggcagcgcaccaggtacttctgaaagcgcaacccctgaatccggtccaggtagcgaaccggctacttctggctctgagactccaggtacttctaccgaaccgtccgaaggtagcgcaccaggtagcccggctggttctccgacttccaccgaggaaggtacctctactgaaccttctgagggtagcgctccaggtacctctactgaaccttccgaaggcagcgctccaggtacttctaccgaaccgtccgagggcagcgctccaggtacttctactgaaccttctgaaggcagcgctccaggtacttctactgaaccttccgaaggtagcgcacca

SEQ ID NO: 564 - protein, 144 aa, Artificial Sequence
  Description of Artificial Sequence: Synthetic polypeptide
GSPAGSPTSTEEGTSESATPESGPGTSTEPSEGSAPGTSESATPESGPGSEPATSGSETPGTSTEPSEGSAPGSPAGSPTSTEEGTSTEPSEGSAPGTSTEPSEGSAPGTSTEPSEGSAPGTSTEPSEGSAPGTSTEPSEGSAP

SEQ ID NO: 565 - DNA, 432 bp, Artificial Sequence
  Description of Artificial Sequence: Synthetic polynucleotide
ggtacttctccgagcggtgaatcttctaccgcaccaggttctactagctctaccgctgaatctccgggcccaggtacttctccgagcggtgaatcttctactgctccaggtacctctgaaagcgctactccggagtctggcccaggtacctctactgaaccgtctgagggtagcgctccaggtacttctactgaaccgtccgaaggtagcgcaccaggttctagcccttctgcatctactggtactggcccaggtagctctactccttctggtgctaccggctctccaggtgcttctccgggtactagctctaccggttctccaggtacttctactccggaaagcggttccgcatctccaggtacttctcctagcggtgaatcttctactgctccaggtacctctcctagcggcgaatcttctactgctcca

SEQ ID NO: 566 - protein, 144 aa, Artificial Sequence
  Description of Artificial Sequence: Synthetic polypeptide
GTSPSGESSTAPGSTSSTAESPGPGTSPSGESSTAPGTSESATPESGPGTSTEPSEGSAPGTSTEPSEGSAPGSSPSASTGTGPGSSTPSGATGSPGASPGTSSTGSPGTSTPESGSASPGTSPSGESSTAPGTSPSGESSTAP

SEQ ID NO: 567 - DNA, 432 bp, Artificial Sequence
  Description of Artificial Sequence: Synthetic polynucleotide
ggtacctctgaaagcgctactccggagtctggcccaggtacctctactgaaccgtctgagggtagcgctccaggtacttctactgaaccgtccgaaggtagcgcaccaggtagccctgctggctctccgacttctactgaggaaggtagcccggctggttctccgacttctactgaggaaggtacttctaccgaaccttccgaaggtagcgctccaggttctagcccttctgcttccaccggtactggcccaggtagctctaccccttctggtgctaccggctccccaggtagctctactccttctggtgcaactggctctccaggtagcgaaccggcaacttccggctctgaaaccccaggtacttctgaaagcgctactcctgagtctggcccaggtagcgaacctgctacctctggctctgaaacccca

SEQ ID NO: 568 - protein, 144 aa, Artificial Sequence
  Description of Artificial Sequence: Synthetic polypeptide
GTSESATPESGPGTSTEPSEGSAPGTSTEPSEGSAPGSPAGSPTSTEEGSPAGSPTSTEEGTSTEPSEGSAPGSSPSASTGTGPGSSTPSGATGSPGSSTPSGATGSPGSEPATSGSETPGTSESATPESGPGSEPATSGSETP

SEQ ID NO: 569 - DNA, 432 bp, Artificial Sequence
  Description of Artificial Sequence: Synthetic polynucleotide
ggtacttctaccgaaccgtccgaaggcagcgctccaggtacctctactgaaccttccgagggcagcgctccaggtacctctaccgaaccttctgaaggtagcgcaccaggtagctctaccccgtctggtgctaccggttccccaggtgcttctcctggtactagctctaccggttctccaggtagctctaccccgtctggtgctactggctctccaggtacttctgaaagcgcaacccctgaatccggtccaggtagcgaaccggctacttctggctctgagactccaggtacttctaccgaaccgtccgaaggtagcgcaccaggttctactagcgaatctccttctggcactgcaccaggttctaccagcgaatctccgtctggcactgcaccaggtacctctacccctgaaagcggttccgcttctcca

SEQ ID NO: 570 - protein, 144 aa, Artificial Sequence
  Description of Artificial Sequence: Synthetic polypeptide
GTSTEPSEGSAPGTSTEPSEGSAPGTSTEPSEGSAPGSSTPSGATGSPGASPGTSSTGSPGSSTPSGATGSPGTSESATPESGPGSEPATSGSETPGTSTEPSEGSAPGSTSESPSGTAPGSTSESPSGTAPGTSTPESGSASP

SEQ ID NO: 571 - DNA, 432 bp, Artificial Sequence
  Description of Artificial Sequence: Synthetic polynucleotide
ggtacctctactcctgaaagcggttctgcatctccaggttccactagctctaccgcagaatctccgggcccaggttctactagctctactgctgaatctcctggcccaggttctagcccttctgcatctactggtactggcccaggtagctctactccttctggtgctaccggctctccaggtgcttctccgggtactagctctaccggttctccaggtagcgaaccggcaacctccggctctgaaaccccaggtacctctgaaagcgctactcctgaatccggcccaggtagcccggcaggttctccgacttccactgaggaaggttctactagcgaatctccttctggcactgcaccaggttctaccagcgaatctccgtctggcactgcaccaggtacctctacccctgaaagcggttccgcttctccc

SEQ ID NO: 572 - protein, 144 aa, Artificial Sequence
  Description of Artificial Sequence: Synthetic polypeptide
GTSTPESGSASPGSTSSTAESPGPGSTSSTAESPGPGSSPSASTGTGPGSSTPSGATGSPGASPGTSSTGSPGSEPATSGSETPGTSESATPESGPGSPAGSPTSTEEGSTSESPSGTAPGSTSESPSGTAPGTSTPESGSASP

SEQ ID NO: 573 - DNA, 432 bp, Artificial Sequence
  Description of Artificial Sequence: Synthetic polynucleotide
ggtagcccggctggctctcctacctctactgaggaaggtacttctgaaagcgctactcctgagtctggtccaggtacctctactgaaccgtccgaaggtagcgctccaggttctaccagcgaatctccttctggcaccgctccaggttctactagcgaatccccgtctggtaccgcaccaggtacttctcctagcggcgaatcttctaccgcaccaggtacctctaccgaaccttccgaaggtagcgctccaggtagcccggcaggttctcctacttccactgaggaaggtacttctaccgaaccttctgagggtagcgcaccaggtagcgaacctgcaacctctggctctgaaaccccaggtacctctgaaagcgctactcctgaatctggcccaggtacttctactgaaccgtccgagggcagcgcacca

SEQ ID NO: 574 - protein, 144 aa, Artificial Sequence
  Description of Artificial Sequence: Synthetic polypeptide
GSPAGSPTSTEEGTSESATPESGPGTSTEPSEGSAPGSTSESPSGTAPGSTSESPSGTAPGTSPSGESSTAPGTSTEPSEGSAPGSPAGSPTSTEEGTSTEPSEGSAPGSEPATSGSETPGTSESATPESGPGTSTEPSEGSAP

SEQ ID NO: 575 - DNA, 432 bp, Artificial Sequence
  Description of Artificial Sequence: Synthetic polynucleotide
ggtacctctaccgaaccttccgaaggtagcgctccaggtagcccggcaggttctcctacttccactgaggaaggtacttctaccgaaccttctgagggtagcgcaccaggtacctcccctagcggcgaatcttctactgctccaggtacctctcctagcggcgaatcttctaccgctccaggtacctcccctagcggtgaatcttctaccgcaccaggttctaccagcgaatccccttctggtactgctccaggttctaccagcgaatccccttctggcaccgcaccaggtacttctacccctgaaagcggctccgcttctccaggtagcgaacctgcaacctctggctctgaaaccccaggtacctctgaaagcgctactcctgaatctggcccaggtacttctactgaaccgtccgagggcagcgcacca

SEQ ID NO: 576 - protein, 144 aa, Artificial Sequence
  Description of Artificial Sequence: Synthetic polypeptide
GTSTEPSEGSAPGSPAGSPTSTEEGTSTEPSEGSAPGTSPSGESSTAPGTSPSGESSTAPGTSPSGESSTAPGSTSESPSGTAPGSTSESPSGTAPGTSTPESGSASPGSEPATSGSETPGTSESATPESGPGTSTEPSEGSAP

SEQ ID NO: 577 - DNA, 432 bp, Artificial Sequence
  Description of Artificial Sequence: Synthetic polynucleotide
ggtagcgaaccggcaacctctggctctgaaaccccaggtacctctgaaagcgctactccggaatctggtccaggtacttctgaaagcgctactccggaatccggtccaggtacttctccgagcggtgaatcttctaccgcaccaggttctactagctctaccgctgaatctccgggcccaggtacttctccgagcggtgaatcttctactgctccaggttctactagcgaatccccgtctggtactgctccaggtacttcccctagcggtgaatcttctactgctccaggttctaccagctctaccgcagaatctccgggtccaggtagctctactccgtctggtgcaaccggttccccaggtagctctaccccttctggtgcaaccggctccccaggtagctctaccccttctggtgcaaactggctctcc

SEQ ID NO: 578 - protein, 144 aa, Artificial Sequence
  Description of Artificial Sequence: Synthetic polypeptide
GSEPATSGSETPGTSESATPESGPGTSESATPESGPGTSPSGESSTAPGSTSSTAESPGPGTSPSGESSTAPGSTSESPSGTAPGTSPSGESSTAPGSTSSTAESPGPGSSTPSGATGSPGSSTPSGATGSPGSSTPSGANWLS

SEQ ID NO: 579 - DNA, 432 bp, Artificial Sequence
  Description of Artificial Sequence: Synthetic polynucleotide
ggtagccctgctggctctccgacttctactgaggaaggtagcccggctggttctccgacttctactgaggaaggtacttctaccgaaccttccgaaggtagcgctccaggtacctctactgaaccttccgaaggcagcgctccaggtacctctaccgaaccgtccgagggcagcgcaccaggtacttctgaaagcgcaacccctgaatccggtccaggtgcatctcctggtaccagctctaccggttctccaggtagctctactccttctggtgctactggctctccaggtgcttccccgggtaccagctctaccggttctccaggtagctctaccccgtctggtgctactggttctccaggtactccgggcagcggtactgcttcttcctctccaggtagctctaccccttctggtgctactggctctcca

SEQ ID NO: 580 - protein, 144 aa, Artificial Sequence
  Description of Artificial Sequence: Synthetic polypeptide
GSPAGSPTSTEEGSPAGSPTSTEEGTSTEPSEGSAPGTSTEPSEGSAPGTSTEPSEGSAPGTSESATPESGPGASPGTSSTGSPGSSTPSGATGSPGASPGTSSTGSPGSSTPSGATGSPGTPGSGTASSSPGSSTPSGATGSP

SEQ ID NO: 581 - DNA, 432 bp, Artificial Sequence
  Description of Artificial Sequence: Synthetic polynucleotide
ggtagctctaccccgtctggtgctactggttctccaggtactccgggcagcggtactgcttcttcctctccaggtagctctaccccttctggtgctactggctctccaggtagcccggctggctctcctacctctactgaggaaggtacttctgaaagcgctactcctgagtctggtccaggtacctctactgaaccgtccgaaggtagcgctccaggtacctctgaaagcgcaactcctgagtctggcccaggtagcgaacctgctacctccggctctgagactccaggtacctctgaaagcgcaaccccggaatctggtccaggtacttctactgaaccgtctgaaggtagcgcaccaggtacttctgaaagcgcaaccccggaatccggcccaggtacctctgaaagcgcaaccccggagtccggccca

SEQ ID NO: 582 - protein, 144 aa, Artificial Sequence
  Description of Artificial Sequence: Synthetic polypeptide
GSSTPSGATGSPGTPGSGTASSSPGSSTPSGATGSPGSPAGSPTSTEEGTSESATPESGPGTSTEPSEGSAPGTSESATPESGPGSEPATSGSETPGTSESATPESGPGTSTEPSEGSAPGTSESATPESGPGTSESATPESGP

SEQ ID NO: 583 - DNA, 57 bp, Artificial Sequence
  Description of Artificial Sequence: Synthetic oligonucleotide
aggtgcaagcgcaagcggcgcgccaagcacgggaggttcgtcttcactcgagggtac

SEQ ID NO: 584 - DNA, 49 bp, Artificial Sequence
  Description of Artificial Sequence: Synthetic oligonucleotide
cctcgagtgaagacgaacctcccgtgcttggcgcgccgcttgcgcttgc

SEQ ID NO: 585 - protein, 11 aa, Artificial Sequence
  Description of Artificial Sequence: Synthetic peptide
GASASGAPSTG

SEQ ID NO: 586 - DNA, 57 bp, Artificial Sequence
  Description of Artificial Sequence: Synthetic oligonucleotide
aggtccagaaccaacggggccggccccaagcggaggttcgtcttcactcgagggtac

SEQ ID NO: 587 - DNA, 49 bp, Artificial Sequence
  Description of Artificial Sequence: Synthetic oligonucleotide
cctcgagtgaagacgaacctccgcttggggccggccccgttggttctgg

SEQ ID NO: 588 - protein, 11 aa, Artificial Sequence
  Description of Artificial Sequence: Synthetic peptide
GPEPTGPAPSG

SEQ ID NO: 589 - protein, 13 aa, Artificial Sequence
  Description of Artificial Sequence: Synthetic peptide
MASPAGSPTSTEE

SEQ ID NO: 590 - protein, 13 aa, Artificial Sequence
  Description of Artificial Sequence: Synthetic peptide
MATSESATPESGP

SEQ ID NO: 591 - protein, 13 aa, Artificial Sequence
  Description of Artificial Sequence: Synthetic peptide
MATSPSGESSTAP

SEQ ID NO: 592 - protein, 13 aa, Artificial Sequence
  Description of Artificial Sequence: Synthetic peptide
MESTSSTAESPGP

SEQ ID NO: 593 - protein, 13 aa, Artificial Sequence
  Description of Artificial Sequence: Synthetic peptide
MASSTPSGATGSP

SEQ ID NO: 594 - protein, 13 aa, Artificial Sequence
  Description of Artificial Sequence: Synthetic peptide
MEASPGTSSTGSP

SEQ ID NO: 595 - protein, 11 aa, Artificial Sequence
  Description of Artificial Sequence: Synthetic peptide
MASTPESGSSG

SEQ ID NO: 596 - DNA, 51 bp, Artificial Sequence
  Description of Artificial Sequence: Synthetic oligonucleotide
atggctagtccggctggctctccgacctccactgaggaaggtacttctact

SEQ ID NO: 597 - DNA, 51 bp, Artificial Sequence
  Description of Artificial Sequence: Synthetic oligonucleotide
atggctagtcctgctggctctccaacctccactgaggaaggtacttctact

SEQ ID NO: 598 - DNA, 51 bp, Artificial Sequence
  Description of Artificial Sequence: Synthetic oligonucleotide
atggctagtccagcaggctctcctacctccaccgaggaaggtacttctact

SEQ ID NO: 599 - DNA, 51 bp, Artificial Sequence
  Description of Artificial Sequence: Synthetic oligonucleotide
atggctagtcctgctggctctccgacctctactgaggaaggtacttctact

SEQ ID NO: 600 - DNA, 51 bp, Artificial Sequence
  Description of Artificial Sequence: Synthetic oligonucleotide
atggctacatccgaaagcgcaacccctgagtccggtccaggtacttctact

SEQ ID NO: 601 - DNA, 51 bp, Artificial Sequence
  Description of Artificial Sequence: Synthetic oligonucleotide
atggctacatccgaaagcgcaacccctgaatctggtccaggtacttctact

SEQ ID NO: 602 - DNA, 51 bp, Artificial Sequence
  Description of Artificial Sequence: Synthetic oligonucleotide
atggctacgtctgaaagcgctactccggaatctggtccaggtacttctact

SEQ ID NO: 603 - DNA, 51 bp, Artificial Sequence
  Description of Artificial Sequence: Synthetic oligonucleotide
atggctacgtccgaaagcgctacccctgaatccggtccaggtacttctact

SEQ ID NO: 604 - DNA, 51 bp, Artificial Sequence
  Description of Artificial Sequence: Synthetic oligonucleotide
atggctagttctaccccgtctggtgcaaccggttccccaggtacttctact

SEQ ID NO: 605 - DNA, 51 bp, Artificial Sequence
  Description of Artificial Sequence: Synthetic oligonucleotide
atggctagctccactccgtctggtgctaccggttccccaggtacttctact

SEQ ID NO: 606 - DNA, 51 bp, Artificial Sequence
  Description of Artificial Sequence: Synthetic oligonucleotide
atggctagctctactccgtctggtgctactggttccccaggtacttctact

SEQ ID NO: 607 - DNA, 51 bp, Artificial Sequence
  Description of Artificial Sequence: Synthetic oligonucleotide
atggctagttctaccccttctggtgctactggttctccaggtacttctact

SEQ ID NO: 608 - DNA, 180 bp, Artificial Sequence
  Description of Artificial Sequence: Synthetic polynucleotide
atggctagtcctgctggctctccaacctccactgaggaaggtgcatccccgggcaccagctctaccggttctccaggtagctctaccccgtctggtgctaccggctctccaggtagctctaccccgtctggtgctactggctctccaggtacttctactgaaccgtctgaaggcagcgca

SEQ ID NO: 609 - DNA, 180 bp, Artificial Sequence; identical to SEQ ID NO: 608
  Description of Artificial Sequence: Synthetic polynucleotide

SEQ ID NO: 610 - DNA, 180 bp, Artificial Sequence
  Description of Artificial Sequence: Synthetic polynucleotide
atggctagtcctgctggctctccaacctccactgaggaaggtacttctaccgaaccgtccgagggtagcgcaccaggtagcccagcaggttctcctacctccaccgaggaaggtacttctaccgaaccgtccgagggtagcgcaccaggtacttctactgaaccgtctgaaggcagcgca

SEQ ID NO: 611 - DNA, 180 bp, Artificial Sequence
  Description of Artificial Sequence: Synthetic polynucleotide
atggctagtcctgctggctctccgacctctactgaggaaggtacttctactgaaccgtctgaaggcagcgcaccaggtagcgaaccggctacttccggttctgaaaccccaggtagcccagcaggttctccaacttctactgaagaaggtacttctactgaaccgtctgaaggcagcgca

SEQ ID NO: 612 - DNA, 180 bp, Artificial Sequence
  Description of Artificial Sequence: Synthetic polynucleotide
atggctagtcctgctggctctccaacctccactgaggaaggtaccccgggtagcggtactgcttcttcctctccaggtagctctaccccttctggtgcaaccggctctccaggtgcttctccgggcaccagctctaccggttctccaggtacttctactgaaccgtctgaaggcagcgca

SEQ ID NO: 613 - DNA, 180 bp, Artificial Sequence; identical to SEQ ID NO: 611
  Description of Artificial Sequence: Synthetic polynucleotide

SEQ ID NO: 614 - DNA, 180 bp, Artificial Sequence
  Description of Artificial Sequence: Synthetic polynucleotide
atggctagtcctgctggctctccgacctctactgaggaaggtacctcccctagcggcgaatcttctactgctccaggtacctctcctagcggcgaatcttctaccgctccaggtacctcccctagcggtgaatcttctaccgcaccaggtacttctactgaaccgtctgaaggcagcgca

SEQ ID NO: 615 - DNA, 180 bp, Artificial Sequence
  Description of Artificial Sequence: Synthetic polynucleotide
atggctagtcctgctggctctccgacctctactgaggaaggtacctctactccggaaagcggttccgcatctccaggttctaccagcgaatccccgtctggcaccgcaccaggttctactagctctactgctgaatctccgggcccaggtacttctactgaaccgtctgaaggcagcgca

SEQ ID NO: 616 - DNA, 180 bp, Artificial Sequence; identical to SEQ ID NO: 614
  Description of Artificial Sequence: Synthetic polynucleotide

SEQ ID NO: 617 - DNA, 180 bp, Artificial Sequence; identical to SEQ ID NO: 615
  Description of Artificial Sequence: Synthetic polynucleotide

SEQ ID NO: 618 - DNA, 180 bp, Artificial Sequence
  Description of Artificial Sequence: Synthetic polynucleotide
atggctgaacctgctggctctccaacctccactgaggaaggtgcatccccgggcaccagctctaccggttctccaggtagctctaccccgtctggtgctaccggctctccaggtagctctaccccgtctggtgctactggctctccaggtacttctactgaaccgtctgaaggcagcgca

SEQ ID NO: 619 - DNA, 180 bp, Artificial Sequence
  Description of Artificial Sequence: Synthetic polynucleotide
atggctgaacctgctggctctccgacctctactgaggaaggtacctcccctagcggcgaatcttctactgctccaggtacctctcctagcggcgaatcttctaccgctccaggtacctcccctagcggtgaatcttctaccgcaccaggtacttctactgaaccgtctgaaggcagcgca

SEQ ID NO: 620 - DNA, 180 bp, Artificial Sequence
  Description of Artificial Sequence: Synthetic polynucleotide
atggctgaacctgctggctctccaacctccactgaggaaggtaccccgggtagcggtactgcttcttcctctccaggtagctctaccccttctggtgcaaccggctctccaggtgcttctccgggcaccagctctaccggttctccaggtagcccggctggctctcctacctctactgag

SEQ ID NO: 621 - DNA, 180 bp, Artificial Sequence
  Description of Artificial Sequence: Synthetic polynucleotide
atggctgaaactgctggctctccaacctccactgaggaaggtgcatccccgggcaccagctctaccggttctccaggtagctctaccccgtctggtgctaccggctctccaggtagctctaccccgtctggtgctactggctctccaggtagcccggctggctctcctacctctactgag

SEQ ID NO: 622 - protein, 288 aa, Artificial Sequence
  Description of Artificial Sequence: Synthetic polypeptide
GEGGGEGGEGEGGGEGGEGEGGGEGGEGEGGGEGGEGEGGGEGGEGEGGGEGGEGEGGGEGGEGEGGGEGGEGEGGGEGGEGEGGGEGGEGEGGGEGGEGEGGGEGGEGEGGGEGGEGEGGGEGGEGEGGGEGGEGEGGGEGGEGEGGGEGGEGEGGGEGGEGEGGGEGGEGEGGGEGGEGEGGGEGGEGEGGGEGGEGEGGGEGGEGEGGGEGGEGEGGGEGGEGEGGGEGGEGEGGGEGGEGEGGGEGGEGEGGGEGGEGEGGGEGGEGEGGGEGGEGEGGGEGGE

SEQ ID NO: 623 - protein, 7 aa, Artificial Sequence
  Description of Artificial Sequence: Synthetic peptide
ENLYFQG

SEQ ID NO: 624 - protein, 12 aa, Artificial Sequence
  Description of Artificial Sequence: Synthetic peptide
GSTSESPSGTAP

SEQ ID NO: 625 - protein, 12 aa, Artificial Sequence
  Description of Artificial Sequence: Synthetic peptide
GTSTPESGSASP

SEQ ID NO: 626 - protein, 12 aa, Artificial Sequence
  Description of Artificial Sequence: Synthetic peptide
GTSPSGESSTAP

SEQ ID NO: 627 - protein, 12 aa, Artificial Sequence
  Description of Artificial Sequence: Synthetic peptide
GSTSSTAESPGP

SEQ ID NO: 628 - protein, 24 aa, Artificial Sequence
  Description of Artificial Sequence: Synthetic peptide
GSPAGSPTSTEEGTSESATPESGP

SEQ ID NO: 629 - protein, 36 aa, Artificial Sequence; identical to SEQ ID NO: 239
  Description of Artificial Sequence: Synthetic polypeptide

SEQ ID NO: 630 - protein, 48 aa, Artificial Sequence
  Description of Artificial Sequence: Synthetic polypeptide
GSPAGSPTSTEEGTSESATPESGPGTSTEPSEGSAPGSPAGSPTSTEE

SEQ ID NO: 631 - protein, 60 aa, Artificial Sequence
  Description of Artificial Sequence: Synthetic polypeptide
GSPAGSPTSTEEGTSESATPESGPGTSTEPSEGSAPGSPAGSPTSTEEGTSTEPSEGSAP

SEQ ID NO: 632 - protein, 108 aa, Artificial Sequence
  Description of Artificial Sequence: Synthetic polypeptide
GSPAGSPTSTEEGTSESATPESGPGTSTEPSEGSAPGSPAGSPTSTEEGTSTEPSEGSAPGTSTEPSEGSAPGTSESATPESGPGSEPATSGSETPGSEPATSGSETP

SEQ ID NO: 633 - protein, 216 aa, Artificial Sequence
  Description of Artificial Sequence: Synthetic polypeptide
GSPAGSPTSTEEGTSESATPESGPGTSTEPSEGSAPGSPAGSPTSTEEGTSTEPSEGSAPGTSTEPSEGSAPGTSESATPESGPGSEPATSGSETPGSEPATSGSETPGSPAGSPTSTEEGTSESATPESGPGTSTEPSEGSAPGTSTEPSEGSAPGSPAGSPTSTEEGTSTEPSEGSAPGTSTEPSEGSAPGTSESATPESGPGTSTEPSEGSAP

SEQ ID NO: 634 - protein, 432 aa, Artificial Sequence
  Description of Artificial Sequence: Synthetic polypeptide
GSPAGSPTSTEEGTSESATPESGPGTSTEPSEGSAPGSPAGSPTSTEEGTSTEPSEGSAPGTSTEPSEGSAPGTSESATPESGPGSEPATSGSETPGSEPATSGSETPGSPAGSPTSTEEGTSESATPESGPGTSTEPSEGSAPGTSTEPSEGSAPGSPAGSPTSTEEGTSTEPSEGSAPGTSTEPSEGSAPGTSESATPESGPGTSTEPSEGSAPGTSESATPESGPGSEPATSGSETPGTSTEPSEGSAPGTSTEPSEGSAPGTSESATPESGPGTSESATPESGPGSPAGSPTSTEEGTSESATPESGPGSEPATSGSETPGTSESATPESGPGTSTEPSEGSAPGTSTEPSEGSAPGTSTEPSEGSAPGTSTEPSEGSAPGTSTEPSEGSAPGTSTEPSEGSAPGSPAGSPTSTEEGTSTEPSEGSAP

SEQ ID NO: 635 - protein, 864 aa, Artificial Sequence; identical to SEQ ID NO: 71
  Description of Artificial Sequence: Synthetic polypeptide

SEQ ID NO: 636 - protein, 576 aa, Artificial Sequence; identical to SEQ ID NO: 66
  Description of Artificial Sequence: Synthetic polypeptide

SEQ ID NO: 637 - protein, 576 aa, Artificial Sequence; identical to SEQ ID NO: 67
  Description of Artificial Sequence: Synthetic polypeptide

SEQ ID NO: 638 - protein, 540 aa, Artificial Sequence; identical to SEQ ID NO: 65
  Description of Artificial Sequence: Synthetic polypeptide

SEQ ID NO: 639 - protein, 504 aa, Artificial Sequence
  Description of Artificial Sequence: Synthetic polypeptide
GASPGTSSTGSPGSSPSASTGTGPGSSPSASTGTGPGTPGSGTASSSPGSSTPSGATGSPGSNPSASTGTGPGASPGTSSTGSPGTPGSGTASSSPGSSTPSGATGSPGTPGSGTASSSPGASPGTSSTGSPGASPGTSSTGSPGTPGSGTASSSPGSSTPSGATGSPGASPGTSSTGSPGTPGSGTASSSPGSSTPSGATGSPGSNPSASTGTGPGSSPSASTGTGPGSSTPSGATGSPGSSTPSGATGSPGASPGTSSTGSPGASPGTSSTGSPGASPGTSSTGSPGTPGSGTASSSPGASPGTSSTGSPGASPGTSSTGSPGASPGTSSTGSPGSSPSASTGTGPGTPGSGTASSSPGASPGTSSTGSPGASPGTSSTGSPGASPGTSSTGSPGSSTPSGATGSPGSSTPSGATGSPGASPGTSSTGSPGTPGSGTASSSPGSSTPSGATGSPGSSTPSGATGSPGSSTPSGATGSPGSSPSASTGTGPGASPGTSSTGSP

SEQ ID NO: 640 - protein, 864 aa, Artificial Sequence; identical to SEQ ID NO: 71
  Description of Artificial Sequence: Synthetic polypeptide

SEQ ID NO: 641 - protein, 875 aa, Artificial Sequence; identical to SEQ ID NO: 72
  Description of Artificial Sequence: Synthetic polypeptide
  MOD_RES (430)..(432): Any amino acid
  MOD_RES (443)..(446): Any amino acid

SEQ ID NO: 642 - protein, 868 aa, Artificial Sequence
  Description of Artificial Sequence: Synthetic polypeptide
GGSPGASPGTSSTGSPGSSPSASTGTGPGSSPSASTGTGPGTPGSGTASSSPGSSTPSGATGSPGSNPSASTGTGPGASPGTSSTGSPGTPGSGTASSSPGSSTPSGATGSPGTPGSGTASSSPGASPGTSSTGSPGASPGTSSTGSPGTPGSGTASSSPGSSTPSGATGSPGASPGTSSTGSPGTPGSGTASSSPGSSTPSGATGSPGSNPSASTGTGPGSSPSASTGTGPGSSTPSGATGSPGSSTPSGATGSPGASPGTSSTGSPGASPGTSSTGSPGASPGTSSTGSPGTPGSGTASSSPGASPGTSSTGSPGASPGTSSTGSPGASPGTSSTGSPGSSPSASTGTGPGTPGSGTASSSPGASPGTSSTGSPGASPGTSSTGSPGASPGTSSTGSPGSSTPSGATGSPGSSTPSGATGSPGASPGTSSTGSPGTPGSGTASSSPGSSTPSGATGSPGSSTPSGATGSPGSSTPSGATGSPGSSPSASTGTGPGASPGTSSTGSPGASPGTSSTGSPGTPGSGTASSSPGASPGTSSTGSPGASPGTSSTGSPGASPGTSSTGSPGASPGTSSTGSPGTPGSGTASSSPGSSTPSGATGSPGTPGSGTASSSPGSSTPSGATGSPGTPGSGTASSSPGSSTPSGATGSPGSSTPSGATGSPGSSPSASTGTGPGSSPSASTGTGPGASPGTSSTGSPGTPGSGTASSSPGSSTPSGATGSPGSSPSASTGTGPGSSPSASTGTGPGASPGTSSTGSPGASPGTSSTGSPGSSTPSGATGSPGSSPSASTGTGPGASPGTSSTGSPGSSPSASTGTGPGTPGSGTASSSPGSSTPSGATGSPGSSTPSGATGSPGASPGTSSTGSP

SEQ ID NO: 643 - protein, 875 aa, Artificial Sequence; identical to SEQ ID NO: 74
  Description of Artificial Sequence: Synthetic polypeptide

SEQ ID NO: 644 - protein, 1318 aa, Artificial Sequence; identical to SEQ ID NO: 77
  Description of Artificial Sequence: Synthetic polypeptide

SEQ ID NO: 645 - protein, 924 aa, Artificial Sequence; identical to SEQ ID NO: 76
  Description of Artificial Sequence: Synthetic polypeptide

SEQ ID NO: 646 - protein, 913 aa, Artificial Sequence; identical to SEQ ID NO: 75
  Description of Artificial Sequence: Synthetic polypeptide

SEQ ID NO: 647 - protein, 864 aa, Artificial Sequence; identical to SEQ ID NO: 78
  Description of Artificial Sequence: Synthetic polypeptide

SEQ ID NO: 648 - protein, 84 aa, Artificial Sequence
  Description of Artificial Sequence: Synthetic polypeptide
ASPAAPAPASPAAPAPSAPAAAPASPAPAAPSAPAPAAPSAASPAAPSAPPAAASPAAPSAPPAASAAAPAAASAAASAPSAAA

SEQ ID NO: 649 - protein, 4 aa, Artificial Sequence
  Description of Artificial Sequence: Synthetic peptide
GGSG

SEQ ID NO: 650 - protein, 288 aa, Artificial Sequence
  Description of Artificial Sequence: Synthetic polypeptide
GSGGEGGSGGEGGSGGEGGSGGEGGSGGEGGSGGEGGSGGEGGSGGEGGSGGEGGSGGEGGSGGEGGSGGEGGSGGEGGSGGEGGSGGEGGSGGEGGSGGEGGSGGEGGSGGEGGSGGEGGSGGEGGSGGEGGSGGEGGSGGEGGSGGEGGSGGEGGSGGEGGSGGEGGSGGEGGSGGEGGSGGEGGSGGEGGSGGEGGSGGEGGSGGEGGSGGEGGSGGEGGSGGEGGSGGEGGSGGEGGSGGEGGSGGEGGSGGEGGSGGEGGSGGEGGSGGEGGSGGEGGSGGEG

SEQ ID NO: 651 - protein, 288 aa, Artificial Sequence
  Description of Artificial Sequence: Synthetic polypeptide
GEGEGGGEGGEGEGGGEGGEGEGGGEGGEGEGGGEGGEGEGGGEGGEGEGGGEGGEGEGGGEGGEGEGGGEGGEGEGGGEGGEGEGGGEGGEGEGGGEGGEGEGGGEGGEGEGGGEGGEGEGGGEGGEGEGGGEGGEGEGGGEGGEGEGGGEGGEGEGGGEGGEGEGGGEGGEGEGGGEGGEGEGGGEGGEGEGGGEGGEGEGGGEGGEGEGGGEGGEGEGGGEGGEGEGGGEGGEGEGGGEGGEGEGGGEGGEGEGGGEGGEGEGGGEGGEGEGGGEGGEGEGGGEG

SEQ ID NO: 652 - protein, 288 aa, Artificial Sequence
  Description of Artificial Sequence: Synthetic polypeptide
SSESSESSSSESSSESSESSSSESSSESSESSSSESSSESSESSSSESSSESSESSSSESSSESSESSSSESSSESSESSSSESSSESSESSSSESSSESSESSSSESSSESSESSSSESSSESSESSSSESSSESSESSSSESSSESSESSSSESSSESSESSSSESSSESSESSSSESSSESSESSSSESSSESSESSSSESSSESSESSSSESSSESSESSSSESSSESSESSSSESSSESSESSSSESSSESSESSSSESSSESSESSSSESSSESSESSSSES

SEQ ID NO: 653 - protein, 288 aa, Artificial Sequence
  Description of Artificial Sequence: Synthetic polypeptide
GEGSGEGSEGEGSEGSGEGEGSEGSGEGEGGSEGSEGEGGSEGSEGEGGSEGSEGEGSGEGSEGEGGSEGSEGEGSGEGSEGEGSEGGSEGEGGSEGSEGEGSGEGSEGEGGEGGSEGEGSEGSGEGEGSGEGSEGEGSEGSGEGEGSGEGSEGEGSEGSGEGEGSEGSGEGEGGSEGSEGEGSEGSGEGEGGEGSGEGEGSGEGSEGEGGGEGSEGEGSGEGGEGEGSEGGSEGEGGSEGGEGEGSEGSGEGEGSEGGSEGEGSEGGSEGEGSEGSGEGEGSEGSGE

SEQ ID NO: 654 - protein, 576 aa, Artificial Sequence
  Description of Artificial Sequence: Synthetic polypeptide
GGKPGEGGKPEGGGGKPGGKPEGEGEGKPGGKPEGGGKPGGGEGGKPEGGKPEGEGKPGGGEGKPGGKPEGGGGKPEGEGKPGGGGGKPGGKPEGEGKPGGGEGGKPEGKPGEGGEGKPGGKPEGGGEGKPGGGKPGEGGKPGEGKPGGGEGGKPEGGKPEGEGKPGGGEGKPGGKPGEGGKPEGGGEGKPGGKPGEGGEGKPGGGKPEGEGKPGGGKPGGGEGGKPEGEGKPGGKPEGGGEGKPGGKPEGGGKPEGGGEGKPGGGKPGEGGKPGEGEGKPGGKPEGEGKPGGEGGGKPEGKPGGGEGGKPEGGKPGEGGKPEGGKPGEGGEGKPGGGKPGEGGKPEGGGKPEGEGKPGGGGKPGEGGKPEGGKPEGGGEGKPGGGKPEGEGKPGGGEGKPGGKPEGGGGKPGEGGKPEGGKPGGEGGGKPEGEGKPGGKPGEGGGGKPGGKPEGEGKPGEGGEGKPGGKPEGGGEGKPGGKPEGGGEGKPGGGKPGEGGKPEGGGKPGEGGKPGEGGKPEGEGKPGGGEGKPGGKPGEGGKPEGGGEGKPGGKPGGEGGGKPEGGKPGEGGKPEG

SEQ ID NO: 655 - protein, 558 aa, Artificial Sequence
  Description of Artificial Sequence: Synthetic polypeptide
GEGKPGGKPGSGGGKPGEGGKPGSGEGKPGGKPGSGGSGKPGGKPGEGGKPEGGSGGKPGGGGKPGGKPGGEGSGKPGGKPEGGGKPEGGSGGKPGGKPEGGSGGKPGGKPGSGEGGKPGGGKPGGEGKPGSGKPGGEGSGKPGGKPEGGSGGKPGGKPEGGSGGKPGGSGKPGGKPGEGGKPEGGSGGKPGGSGKPGGKPEGGGSGKPGGKPGEGGKPGSGEGGKPGGGKPGGEGKPGSGKPGGEGSGKPGGKPGSGGEGKPGGKPEGGSGGKPGGGKPGGEGKPGSGGKPGEGGKPGSGGGKPGGKPGGEGEGKPGGKPGEGGKPGGEGSGKPGGGGKPGGKPGGEGGKPEGSGKPGGGSGKPGGKPEGGGGKPEGSGKPGGGGKPEGSGKPGGGKPEGGSGGKPGGSGKPGGKPGEGGGKPEGSGKPGGGSGKPGGKPEGGGKPEGGSGGKPGGKPEGGSGGKPGGKPGGEGSGKPGGKPGSGEGGKPGGKPGEGSGGKPGGKPEGGSGGKPGGSGKPGGKPEGGGSGKPGGKPGEGGKPGGEGSGKPGGSGKPG

SEQ ID NO: 656 - protein, 577 aa, Artificial Sequence
  Description of Artificial Sequence: Synthetic polypeptide
GGSGKPGKPGGSGSGKPGSGKPGGGSGKPGSGKPGGGSGKPGSGKPGGGSGKPGSGKPGGGGKPGSGSGKPGGGKPGGSGGKPGGGSGKPGKPGSGGSGKPGSGKPGGGSGGKPGKPGSGGSGGKPGKPGSGGGSGKPGKPGSGGSGGKPGKPGSGGSGGKPGKPGSGGSGKPGSGKPGGGSGKPGSGKPGSGGSGKPGKPGSGGSGKPGSGKPGSGSGKPGSGKPGGGSGKPGSGKPGSGGSGKPGKPGSGGGKPGSGSGKPGGGKPGSGSGKPGGGKPGGSGGKPGGSGGKPGKPGSGGGSGKPGKPGSGGGSGKPGKPGGSGSGKPGSGKPGGGSGKPGSGKPGSGGSGKPGKPGSGGSGGKPGKPGSGGGKPGSGSGKPGGGKPGSGSGKPGGGKPGSGSGKPGGGKPGSGSGKPGGSGKPGSGKPGGGSGGKPGKPGSGGSGKPGSGKPGSGGSGKPGKPGGSGSGKPGSGKPGGGSGKPGSGKPGGGSGKPGSGKPGGGSGKPGSGKPGGGGKPGSGSGKPGGSGGKPGKPGSGGSGGKPGKPGSGGSGKPGSGKPGGGSGGKPGKPGSGG

SEQ ID NO: 657 - protein, 576 aa, Artificial Sequence
  Description of Artificial Sequence: Synthetic polypeptide
GEGSGEGSEGEGSEGSGEGEGSEGSGEGEGGSEGSEGEGSEGSGEGEGGEGSGEGEGSGEGSEGEGGGEGSEGEGSGEGGEGEGSEGGSEGEGGSEGGEGEGSEGSGEGEGSEGGSEGEGSEGGSEGEGSEGSGEGEGSEGSGEGEGSEGSGEGEGSEGSGEGEGSEGGSEGEGGSEGSEGEGSGEGSEGEGGSEGSEGEGGGEGSEGEGSGEGSEGEGGSEGSEGEGGSEGSEGEGGEGSGEGEGSEGSGEGEGSGEGSEGEGSEGSGEGEGSEGSGEGEGGSEGSEGEGSGEGSEGEGSEGSGEGEGSEGSGEGEGGSEGSEGEGGSEGSEGEGGSEGSEGEGGEGSGEGEGSEGSGEGEGSGEGSEGEGSEGSGEGEGSEGSGEGEGGSEGSEGEGSEGSGEGEGGEGSGEGEGSGEGSEGEGGGEGSEGEGSEGSGEGEGSEGSGEGEGSEGGSEGEGGSEGSEGEGSEGGSEGEGSEGGSEGEGSEGSGEGEGSEGSGEGEGSGEGSEGEGGSEGGEGEGSEGGSEGEGSEGGSEGEGGEGSGEGEGGGEGSEGEGSEGSGEGEGSGEGSE

SEQ ID NO: 658 - protein, 576 aa, Artificial Sequence; identical to SEQ ID NO: 66
  Description of Artificial Sequence: Synthetic polypeptide

SEQ ID NO: 659 - protein, 577 aa, Artificial Sequence
  Description of Artificial Sequence: Synthetic polypeptide
AGSPAGSPTSTEEGTSESATPESGPGTSTEPSEGSAPGSPAGSPTSTEEGTSTEPSEGSAPGTSTEPSEGSAPGTSESATPESGPGSEPATSGSETPGSEPATSGSETPGSPAGSPTSTEEGTSESATPESGPGTSTEPSEGSAPGTSTEPSEGSAPGSPAGSPTSTEEGTSTEPSEGSAPGTSTEPSEGSAPGTSESATPESGPGTSTEPSEGSAPGTSESATPESGPGSEPATSGSETPGTSTEPSEGSAPGTSTEPSEGSAPGTSESATPESGPGTSESATPESGPGSPAGSPTSTEEGTSESATPESGPGSEPATSGSETPGTSESATPESGPGTSTEPSEGSAPGTSTEPSEGSAPGTSTEPSEGSAPGTSTEPSEGSAPGTSTEPSEGSAPGTSTEPSEGSAPGSPAGSPTSTEEGTSTEPSEGSAPGTSESATPESGPGSEPATSGSETPGTSESATPESGPGSEPATSGSETPGTSESATPESGPGTSTEPSEGSAPGTSESATPESGPGSPAGSPTSTEEGSPAGSPTSTEEGSPAGSPTSTEEGTSESATPESGPGTSTEPSEGSAP

SEQ ID NO: 660 - protein, 540 aa, Artificial Sequence; identical to SEQ ID NO: 65
  Description of Artificial Sequence: Synthetic polypeptide

SEQ ID NO: 661 - protein, 504 aa, Artificial Sequence; identical to SEQ ID NO: 639
  Description of Artificial Sequence: Synthetic polypeptide

SEQ ID NO: 662 - protein, 816 aa, Artificial Sequence
  Description of Artificial Sequence: Synthetic polypeptide
GSPAGSPTSTEEGTSESATPESGPGTSTEPSEGSAPGSPAGSPTSTEEGTSTEPSEGSAPGTSTEPSEGSAPGTSESATPESGPGSEPATSGSETPGSEPATSGSETPGSPAGSPTSTEEGTSESATPESGPGTSTEPSEGSAPGTSTEPSEGSAPGSPAGSPTSTEEGTSTEPSEGSAPGTSTEPSEGSAPGTSESATPESGPGTSTEPSEGSAPGTSESATPESGPGSEPATSGSETPGTSTEPSEGSAPGTSTEPSEGSAPGTSESATPESGPGTSESATPESGPGSPAGSPTSTEEGTSESATPESGPGSEPATSGSETPGTSESATPESGPGTSTEPSEGSAPGTSTEPSEGSAPGTSTEPSEGSAPGTSTEPSEGSAPGTSTEPSEGSAPGTSTEPSEGSAPGSPAGSPTSTEEGTSTEPSEGSAPGTSESATPESGPGSEPATSGSETPGTSESATPESGPGSEPATSGSETPGTSESATPESGPGTSTEPSEGSAPGTSESATPESGPGSPAGSPTSTEEGSPAGSPTSTEEGSPAGSPTSTEEGTSESATPESGPGTSTEPSEGSAPGTSESATPESGPGSEPATSGSETPGTSESATPESGPGSEPATSGSETPGTSESATPESGPGTSTEPSEGSAPGSPAGSPTSTEEGTSESATPESGPGSEPATSGSETPGTSESATPESGPGSPAGSPTSTEEGSPAGSPTSTEEGTSTEPSEGSAPGTSESATPESGPGTSESATPESGPGTSESATPESGPGSEPATSGSETPGSEPATSGSETPGSPAGSPTSTEEGTSTEPSEGSAP

SEQ ID NO: 663 - protein, 875 aa, Artificial Sequence; identical to SEQ ID NO: 72
  Description of Artificial Sequence: Synthetic polypeptide
  MOD_RES (430)..(432): Any amino acid
  MOD_RES (443)..(446): Any amino acid

SEQ ID NO: 664 - protein, 868 aa, Artificial Sequence; identical to SEQ ID NO: 642
  Description of Artificial Sequence: Synthetic polypeptide

SEQ ID NO: 665 - protein, 875 aa, Artificial Sequence; identical to SEQ ID NO: 74
  Description of Artificial Sequence: Synthetic polypeptide

SEQ ID NO: 666 - protein, 1318 aa, Artificial Sequence; identical to SEQ ID NO: 77
  Description of Artificial Sequence: Synthetic polypeptide

SEQ ID NO: 667 - protein, 9 aa, Artificial Sequence
  Description of Artificial Sequence: Synthetic peptide
FDKLPRTSG

SEQ ID NO: 668 - protein, 7 aa, Artificial Sequence
  Description of Artificial Sequence: Synthetic peptide
FKLMVWY

SEQ ID NO: 669 - protein, 241 aa, Artificial Sequence
  Description of Artificial Sequence: Synthetic polypeptide
MAEPAGSPTSTEEGTPGSGTASSSPGSSTPSGATGSPGASPGTSSTGSPGFPTIPLSRLFDNAMLRAHRLHQLAFDTYQEFEEAYIPKEQKYSFLQNPQTSLCFSESIPTPSNREETQQKSNLELLRISLLLIQSWLEPVQFLRSVFANSLVYGASDSNVYDLLKDLEEGIQTLMGRLEDGSPRTGQIFKQTYSKFDTNSHNDDALLKNYGLLYCFRKDMDKVETFLRIVQCRSVEGSCGF

SEQ ID NO: 670 - DNA, 726 bp, Artificial Sequence
  Description of Artificial Sequence: Synthetic polynucleotide
atggctgaacctgctggctctccaacctccactgaggaaggtaccccgggtagcggtactgcttcttcctctccaggtagctctaccccttctggtgcaaccggctctccaggtgcttctccgggcaccagctctaccggttctccaggttttccgactattccgctgtctcgtctgtttgataatgctatgctgcgtgcgcaccgtctgcaccagctggcctttgatacttaccaggaatttgaagaagcctacattcctaaagagcagaagtactctttcctgcaaaacccacagacttctctctgcttcagcgaatctattccgacgccttccaatcgcgaggaaactcagcaaaagtccaatctggaactactccgcatttctctgcttctgattcagagctggctagaaccagtgcaatttctgcgttccgtcttcgccaatagcctagtttatggcgcatccgacagcaacgtatacgatctcctgaaagatctcgaggaaggcattcagaccctgatgggtcgtctcgaggatggctctccgcgtactggtcagatcttcaagcagacttactctaaatttgatactaacagccacaatgacgatgcgcttctaaaaaactatggtctgctgtattgttttcgtaaagatatggacaaagttgaaaccttcctgcgtattgttcagtgtcgttccgttgagggcagctgtggtttctaa

SEQ ID NO: 671 - protein, 241 aa, Artificial Sequence
  Description of Artificial Sequence: Synthetic polypeptide
MAEPAGSPTSTEEGASPGTSSTGSPGSSTPSGATGSPGSSTPSGATGSPGFPTIPLSRLFDNAMLRAHRLHQLAFDTYQEFEEAYIPKEQKYSFLQNPQTSLCFSESIPTPSNREETQQKSNLELLRISLLLIQSWLEPVQFLRSVFANSLVYGASDSNVYDLLKDLEEGIQTLMGRLEDGSPRTGQIFKQTYSKFDTNSHNDDALLKNYGLLYCFRKDMDKVETFLRIVQCRSVEGSCGF

SEQ ID NO: 672 - DNA, 726 bp, Artificial Sequence
  Description of Artificial Sequence: Synthetic polynucleotide
atggctgaacctgctggctctccaacctccactgaggaaggtgcatccccgggcaccagctctaccggttctccaggtagctctaccccgtctggtgctaccggctctccaggtagctctaccccgtctggtgctactggctctccaggttttccgactattccgctgtctcgtctgtttgataatgctatgctgcgtgcgcaccgtctgcaccagctggcctttgatacttaccaggaatttgaagaagcctacattcctaaagagcagaagtactctttcctgcaaaacccacagacttctctctgcttcagcgaatctattccgacgccttccaatcgcgaggaaactcagcaaaagtccaatctggaactactccgcatttctctgcttctgattcagagctggctagaaccagtgcaatttctgcgttccgtcttcgccaatagcctagtttatggcgcatccgacagcaacgtatacgatctcctgaaagatctcgaggaaggcattcagaccctgatgggtcgtctcgaggatggctctccgcgtactggtcagatcttcaagcagacttactctaaatttgatactaacagccacaatgacgatgcgcttctaaaaaactatggtctgctgtattgttttcgtaaagatatggacaaagttgaaaccttcctgcgtattgttcagtgtcgttccgttgagggcagctgtggtttctaa

SEQ ID NO: 673 - protein, 336 aa, Artificial Sequence
  Description of Artificial Sequence: Synthetic polypeptide
GSEPATSGSETPGTSESATPESGPGSEPATSGSETPGSPAGSPTSTEEGTSTEPSEGSAPGSEPATSGSETPGSEPATSGSETPGSEPATSGSETPGTSTEPSEGSAPGTSESATPESGPGSEPATSGSETPGTSTEPSEGSAPGFPTIPLSRLFDNAMLRAHRLHQLAFDTYQEFEEAYIPKEQKYSFLQNPQTSLCFSESIPTPSNREETQQKSNLELLRISLLLIQSWLEPVQFLRSVFANSLVYGASDSNVYDLLKDLEEGIQTLMGRLEDGSPRTGQIFKQTYSKFDTNSHNDDALLKNYGLLYCFRKDMDKVETFLRIVQCRSVEGSCGF

SEQ ID NO: 674 - DNA, 1011 bp, Artificial Sequence
  Description of Artificial Sequence: Synthetic polynucleotide
ggtagcgaaccggcaacttccggctctgaaaccccaggtacttctgaaagcgctactcctgagtctggcccaggtagcgaacctgctacctctggctctgaaaccccaggtagcccggcaggctctccgacttccaccgaggaaggtacctctactgaaccttctgagggtagcgctccaggtagcgaaccggcaacctctggctctgaaaccccaggtagcgaacctgctacctccggctctgaaactccaggtagcgaaccggctacttccggttctgaaactccaggtacctctaccgaaccttccgaaggcagcgcaccaggtacttctgaaagcgcaacccctgaatccggtccaggtagcgaaccggctacttctggctctgagactccaggtacttctaccgaaccgtccgaaggtagcgcaccaggttttccgactattccgctgtctcgtctgtttgataatgctatgctgcgtgcgcaccgtctgcaccagctggcctttgatacttaccaggaatttgaagaagcctacattcctaaagagcagaagtactctttcctgcaaaacccacagacttctctctgcttcagcgaatctattccgacgccttccaatcgcgaggaaactcagcaaaagtccaatctggaactactccgcatttctctgcttctgattcagagctggctagaaccagtgcaatttctgcgttccgtcttcgccaatagcctagtttatggcgcatccgacagcaacgtatacgatctcctgaaagatctcgaggaaggcattcagaccctgatgggtcgtctcgaggatggctctccgcgtactggtcagatcttcaagcagacttactctaaatttgatactaacagccacaatgacgatgcgcttctaaaaaactatggtctgctgtattgttttcgtaaagatatggacaaagttgaaaccttcctgcgtattgttcagtgtcgttccgttgagggcagctgtggtttctaa

SEQ ID NO: 675 - protein, 480 aa, Artificial Sequence
  Description of Artificial Sequence: Synthetic polypeptide
GTSESATPESGPGSEPATSGSETPGTSESATPESGPGSEPATSGSETPGTSESATPESGPGTSTEPSEGSAPGSPAGSPTSTEEGTSESATPESGPGSEPATSGSETPGTSESATPESGPGSPAGSPTSTEEGSPAGSPTSTEEGTSTEPSEGSAPGTSESATPESGPGTSESATPESGPGTSESATPESGPGSEPATSGSETPGSEPATSGSETPGSPAGSPTSTEEGTSTEPSEGSAPGTSTEPSEGSAPGSEPATSGSETPGTSESATPESGPGTSTEPSEGSAPGFPTIPLSRLFDNAMLRAHRLHQLAFDTYQEFEEAYIPKEQKYSFLQNPQTSLCFSESIPTPSNREETQQKSNLELLRISLLLIQSWLEPVQFLRSVFANSLVYGASDSNVYDLLKDLEEGIQTLMGRLEDGSPRTGQIFKQTYSKFDTNSHNDDALLKNYGLLYCFRKDMDKVETFLRIVQCRSVEGSCGF

SEQ ID NO: 676 - DNA, 1443 bp, Artificial Sequence
  Description of Artificial Sequence: Synthetic polynucleotide
ggtacctctgaaagcgcaactcctgagtctggcccaggtagcgaacctgctacctccggctctgagactccaggtacctctgaaagcgcaaccccggaatctggtccaggtagcgaacctgcaacctctggctctgaaaccccaggtacctctgaaagcgctactcctgaatctggcccaggtacttctactgaaccgtccgagggcagcgcaccaggtagccctgctggctctccaacctccaccgaagaaggtacctctgaaagcgcaacccctgaatccggcccaggtagcgaaccggcaacctccggttctgaaaccccaggtacttctgaaagcgctactcctgagtccggcccaggtagcccggctggctctccgacttccaccgaggaaggtagcccggctggctctccaacttctactgaagaaggtacttctaccgaaccttccgagggcagcgcaccaggtacttctgaaagcgctacccctgagtccggcccaggtacttctgaaagcgctactcctgaatccggtccaggtacttctgaaagcgctaccccggaatctggcccaggtagcgaaccggctacttctggttctgaaaccccaggtagcgaaccggctacctccggttctgaaactccaggtagcccagcaggctctccgacttccactgaggaaggtacttctactgaaccttccgaaggcagcgcaccaggtacctctactgaaccttctgagggcagcgctccaggtagcgaacctgcaacctctggctctgaaaccccaggtacctctgaaagcgctactcctgaatctggcccaggtacttctactgaaccgtccgagggcagcgcaccaggttttccgactattccgctgtctcgtctgtttgataatgctatgctgcgtgcgcaccgtctgcaccagctggcctttgatacttaccaggaatttgaagaagcctacattcctaaagagcagaagtactctttcctgcaaaacccacagacttctctctgcttcagcgaatctattccgacgccttccaatcgcgaggaaactcagcaaaagtccaatctggaactactccgcatttctctgcttctgattcagagctggctagaaccagtgcaatttctgcgttccgtcttcgccaatagcctagtttatggcgcatccgacagcaacgtatacgatctcctgaaagatctcgaggaaggcattcagaccctgatgggtcgtctcgaggatggctctccgcgtactggtcagatcttcaagcagacttactctaaatttgatactaacagccacaatgacgatgcgcttctaaaaaactatggtctgctgtattgttttcgtaaagatatggacaaagttgaaaccttcctgcgtattgttcagtgtcgttccgttgagggcagctgtggtttctaa

SEQ ID NO: 677 - protein, 336 aa, Artificial Sequence
  Description of Artificial Sequence: Synthetic polypeptide
GTSTPESGSASPGTSPSGESSTAPGTSPSGESSTAPGSTSSTAESPGPGSTSESPSGTAPGSTSSTAESPGPGTSPSGESSTAPGTSTPESGSASPGSTSSTAESPGPGTSPSGESSTAPGTSPSGESSTAPGTSPSGESSTAPGFPTIPLSRLFDNAMLRAHRLHQLAFDTYQEFEEAYIPKEQKYSFLQNPQTSLCFSESIPTPSNREETQQKSNLELLRISLLLIQSWLEPVQFLRSVFANSLVYGASDSNVYDLLKDLEEGIQTLMGRLEDGSPRTGQIFKQTYSKFDTNSHNDDALLKNYGLLYCFRKDMDKVETFLRIVQCRSVEGSCGF

SEQ ID NO: 678 - DNA, 1011 bp, Artificial Sequence
  Description of Artificial Sequence: Synthetic polynucleotide
ggtacttctactccggaaagcggttccgcatctccaggtacttctcctagcggtgaatcttctactgctccaggtacctctcctagcggcgaatcttctactgctccaggttctaccagctctaccgctgaatctcctggcccaggttctaccagcgaatccccgtctggcaccgcaccaggttctactagctctaccgcagaatctccgggtccaggtacttcccctagcggtgaatcttctactgctccaggtacctctactccggaaagcggctccgcatctccaggttctactagctctactgctgaatctcctggtccaggtacctcccctagcggcgaatcttctactgctccaggtacctctcctagcggcgaatcttctaccgctccaggtacctcccctagcggtgaatcttctaccgcaccaggttttccgactattccgctgtctcgtctgtttgataatgctatgctgcgtgcgcaccgtctgcaccagctggcctttgatacttaccaggaatttgaagaagcctacattcctaaagagcagaagtactctttcctgcaaaacccacagacttctctctgcttcagcgaatctattccgacgccttccaatcgcgaggaaactcagcaaaagtccaatctggaactactccgcatttctctgcttctgattcagagctggctagaaccagtgcaatttctgcgttccgtcttcgccaatagcctagtttatggcgcatccgacagcaacgtatacgatctcctgaaagatctcgaggaaggcattcagaccctgatgggtcgtctcgaggatggctctccgcgtactggtcagatcttcaagcagacttactctaaatttgatactaacagccacaatgacgatgcgcttctaaaaaactatggtctgctgtattgttttcgtaaagatatggacaaagttgaaaccttcctgcgtattgttcagtgtcgttccgttgagggcagctgtggtttctaa

SEQ ID NO: 679 - protein, 768 aa, Artificial Sequence
  Description of Artificial Sequence: Synthetic polypeptide
GSSESGSSEGGPGSGGEPSESGSSGSSESGSSEGGPGSSESGSSEGGPGSSESGSSEGGPGSSESGSSEGGPGSSESGSSEGGPGESPGGSSGSESGSEGSSGPGESSGSSESGSSEGGPGSSESGSSEGGPGSSESGSSEGGPGSGGEPSESGSSGESPGGSSGSESGESPGGSSGSESGSGGEPSESGSSGSSESGSSEGGPGSGGEPSESGSSGSGGEPSESGSSGSEGSSGPGESSGESPGGSSGSESGSGGEPSESGSSGSGGEPSESGSSGSGGEPSESGSSGSSESGSSEGGPGESPGGSSGSESGESPGGSSGSESGESPGGSSGSESGESPGGSSGSESGESPGGSSGSESGSSESGSSEGGPGSGGEPSESGSSGSEGSSGPGESSGSSESGSSEGGPGSGGEPSESGSSGSSESGSSEGGPGSGGEPSESGSSGESPGGSSGSESGESPGGSSGSESGSSESGSSEGGPGSGGEPSESGSSGSSESGSSEGGPGSGGEPSESGSSGSGGEPSESGSSGESPGGSSGSESGSEGSSGPGESSGSSESGSSEGGPGSEGSSGPGESSGFPTIPLSRLFDNAMLRAHRLHQLAFDTYQEFEEAYIPKEQKYSFLQNPQTSLCFSESIPTPSNREETQQKSNLELLRISLLLIQSWLEPVQFLRSVFANSLVYGASDSNVYDLLKDLEEGIQTLMGRLEDGSPRTGQIFKQTYSKFDTNSHNDDALLKNYGLLYCFRKDMDKVETFLRIVQCRSVEGSCGF

SEQ ID NO: 680 - DNA, 2307 bp, Artificial Sequence
  Description of Artificial Sequence: Synthetic polynucleotide
ggttcctctgaaagcggttcttccgaaggtggtccaggttcctctgaaagcggttcttctgagggtggtccaggtgaatctccgggtggctccagcggttccgagtcaggttctggtggcgaaccttccgagtctggtagctcaggtgaatctccgggtggttctagcggttccgagtcaggtgaatctccgggtggttccagcggttctgagtcaggttcctccgaaagcggttcttctgagggcggtccaggttcctccgaaagcggttcttccgagggcggtccaggttcttctgaaagcggttcttccgagggcggtccaggtgaatctcctggtggttccagcggttccgagtcaggtgaatctccaggtggctctagcggttccgagtcaggtgaatctcctggtggttctagcggttctgaatcaggttcctccgaaagcggttcttctgagggcggtccaggttcctccgaaagcggttcttccgagggcggtccaggttcttctgaaagcggttcttccgagggcggtccaggttcctctgaaagcggttcttctgagggcggtccaggttcttccgaaagcggttcttccgagggcggtccaggttcttccgaaagcggttcttctgaaggcggtccaggttctggtggcgaaccgtccgagtctggtagctcaggtgaatctccgggtggctctagcggttccgagtcaggtgaatctcctggtggttccagcggttccgagtcaggttccggtggcgaaccgtccgaatctggtagctcaggtagcgaaggttcttctggtccaggcgaatcttcaggttcctctgaaagcggttcttctgagggcggtccaggttccggtggcgaaccgtccgaatctggtagctcaggtagcgaaggttcttctggtccaggcgaatcttcaggttcctctgaaagcggttcttctgagggcggtccaggttccggtggcgaaccttccgaatctggtagctcaggtgaatctccgggtggttctagcggttctgagtcaggttctggtggtgaaccttccgagtctggtagctcaggttctggtggcgaaccatccgagtctggtagctcaggttcttccgaaagcggttcttccgaaggcggtccaggttctggtggtgaaccgtccgaatctggtagctcaggttctggtggcgaaccatccgaatctggtagctcaggtagcgaaggttcttctggtcctggcgaatcttcaggtgaatctccaggtggctctagcggttccgaatcaggtagcgaaggttcttccggtccaggtgaatcttcaggtagcgaaggttcttctggtcctggtgaatcctcaggttccggtggcgaaccatctgaatctggtagctcaggttcctctgaaagcggttcttccgaaggtggtccaggttcctctgaaagcggttcttctgagggtggtccaggtgaatctccgggtggctccagcggttccgagtcaggttctggtggcgaaccatccgaatctggtagctcaggtagcgaaggttcttctggtcctggcgaatcttcaggtgaatctccaggtggctctagcggttccgaatcaggtagcgaaggttcttccggtcctggtgagtcttcaggtgaatctccaggtggctctagcggttccgagtcaggtagcgaaggttcttctggtcctggcgagtcctcaggttttccgactattccgctgtctcgtctgtttgataatgctatgctgcgtgcgcaccgtctgcaccagctggcctttgatacttaccaggaatttgaagaagcctacattcctaaagagcagaagtactctttcctgcaaaacccacagacttctctctgcttcagcgaatctattccgacgccttccaatcgcgaggaaactcagcaaaagtccaatctggaactactccgcatttctctgcttctgattcagagctggctagaaccagtgcaatttctgcgttccgtcttcgccaatagcctagtttatggcgcatccgacagcaacgtatacgatctcctgaaagatctcgaggaaggcattcagaccctgatgggtcgtctcgaggatggctctccgcgtactggtcagatcttcaagcagacttactctaaatttgatactaacagccacaatgacgatgcgcttctaaaaaactatggtctgctgtattgttttcgtaaagatatggacaaagttgaaaccttcctgcgtattgttcagtgtcgttccgttgagggcagctgtggtttctaa

SEQ ID NO: 681 - protein, 768 aa, Artificial Sequence
  Description of Artificial Sequence: Synthetic polypeptide
GSPAGSPTSTEEGTSESATPESGPGTSTEPSEGSAPGSPAGSPTSTEEGTSTEPSEGSAPGTSTEPSEGSAPGTSESATPESGPGSEPATSGSETPGSEPATSGSETPGSPAGSPTSTEEGTSESATPESGPGTSTEPSEGSAPGTSTEPSEGSAPGSPAGSPTSTEEGTSTEPSEGSAPGTSTEPSEGSAPGTSESATPESGPGTSTEPSEGSAPGTSESATPESGPGSEPATSGSETPGTSTEPSEGSAPGTSTEPSEGSAPGTSESATPESGPGTSESATPESGPGSPAGSPTSTEEGTSESATPESGPGSEPATSGSETPGTSESATPESGPGTSTEPSEGSAPGTSTEPSEGSAPGTSTEPSEGSAPGTSTEPSEGSAPGTSTEPSEGSAPGTSTEPSEGSAPGSPAGSPTSTEEGTSTEPSEGSAPGTSESATPESGPGSEPATSGSETPGTSESATPESGPGSEPATSGSETPGTSESATPESGPGTSTEPSEGSAPGTSESATPESGPGSPAGSPTSTEEGSPAGSPTSTEEGSPAGSPTSTEEGTSESATPESGPGTSTEPSEGSAPGFPTIPLSRLFDNAMLRAHRLHQLAFDTYQEFEEAYIPKEQKYSFLQNPQTSLCFSESIPTPSNREETQQKSNLELLRISLLLIQSWLEPVQFLRSVFANSLVYGASDSNVYDLLKDLEEGIQTLMGRLEDGSPRTGQIFKQTYSKFDTNSHNDDALLKNYGLLYCFRKDMDKVETFLRIVQCRSVEGSCGF

SEQ ID NO: 682 - DNA, 2307 bp, Artificial Sequence
  Description of Artificial Sequence: Synthetic polynucleotide
ggtagcccggctggctctcctacctctactgaggaaggtacttctgaaagcgctactcctgagtctggtccaggtacctctactgaaccgtccgaaggtagcgctccaggtagcccagcaggctctccgacttccactgaggaaggtacttctactgaaccttccgaaggcagcgcaccaggtacctctactgaaccttctgagggcagcgctccaggtacttctgaaagcgctaccccggaatctggcccaggtagcgaaccggctacttctggttctgaaaccccaggtagcgaaccggctacctccggttctgaaactccaggtagcccggcaggctctccgacctctactgaggaaggtacttctgaaagcgcaaccccggagtccggcccaggtacctctaccgaaccgtctgagggcagcgcaccaggtacttctaccgaaccgtccgagggtagcgcaccaggtagcccagcaggttctcctacctccaccgaggaaggtacttctaccgaaccgtccgagggtagcgcaccaggtacctctactgaaccttctgagggcagcgctccaggtacttctgaaagcgctaccccggagtccggtccaggtacttctactgaaccgtccgaaggtagcgcaccaggtacttctgaaagcgcaacccctgaatccggtccaggtagcgaaccggctacttctggctctgagactccaggtacttctaccgaaccgtccgaaggtagcgcaccaggtacttctactgaaccgtctgaaggtagcgcaccaggtacttctgaaagcgcaaccccggaatccggcccaggtacctctgaaagcgcaaccccggagtccggcccaggtagccctgctggctctccaacctccaccgaagaaggtacctctgaaagcgcaacccctgaatccggcccaggtagcgaaccggcaacctccggttctgaaaccccaggtacctctgaaagcgctactccggagtctggcccaggtacctctactgaaccgtctgagggtagcgctccaggtacttctactgaaccgtccgaaggtagcgcaccaggtacttctaccgaaccgtccgaaggcagcgctccaggtacctctactgaaccttccgagggcagcgctccaggtacctctaccgaaccttctgaaggtagcgcaccaggtacttctaccgaaccgtccgagggtagcgcaccaggtagcccagcaggttctcctacctccaccgaggaaggtacttctaccgaaccgtccgagggtagcgcaccaggtacctctgaaagcgcaactcctgagtctggcccaggtagcgaacctgctacctccggctctgagactccaggtacctctgaaagcgcaaccccggaatctggtccaggtagcgaacctgcaacctctggctctgaaaccccaggtacctctgaaagcgctactcctgaatctggcccaggtacttctactgaaccgtccgagggcagcgcaccaggtacttctgaaagcgctactcctgagtccggcccaggtagcccggctggctctccgacttccaccgaggaaggtagcccggctggctctccaacttctactgaagaaggtagcccggcaggctctccgacctctactgaggaaggtacttctgaaagcgcaaccccggagtccggcccaggtacctctaccgaaccgtctgagggcagcgcaccaggttttccgactattccgctgtctcgtctgtttgataatgctatgctgcgtgcgcaccgtctgcaccagctggcctttgatacttaccaggaatttgaagaagcctacattcctaaagagcagaagtactctttcctgcaaaacccacagacttctctctgcttcagcgaatctattccgacgccttccaatcgcgaggaaactcagcaaaagtccaatctggaactactccgcatttctctgcttctgattcagagctggctagaaccagtgcaatttctgcgttccgtcttcgccaatagcctagtttatggcgcatccgacagcaacgtatacgatctcctgaaagatctcgaggaaggcattcagaccctgatgggtcgtctcgaggatggctctccgcgtactggtcagatcttcaagcagacttactctaaatttgatactaacagccacaatgacgatgcgcttctaaaaaactatggtctgctgtattgttttcgtaaagatatggacaaagttgaaaccttcctgcgtattgttcagtgtcgttccgttgagggcagctgtggtttctaa

SEQ ID NO: 683 - protein, 768 aa, Artificial Sequence
  Description of Artificial Sequence: Synthetic polypeptide
GSTSSTAESPGPGSTSSTAESPGPGSTSESPSGTAPGSTSSTAESPGPGSTSSTAESPGPGTSTPESGSASPGSTSESPSGTAPGTSPSGESSTAPGSTSESPSGTAPGSTSESPSGTAPGTSPSGESSTAPGSTSESPSGTAPGSTSESPSGTAPGTSPSGESSTAPGSTSESPSGTAPGSTSESPSGTAPGSTSESPSGTAPGTSTPESGSASPGSTSESPSGTAPGTSTPESGSASPGSTSSTAESPGPGSTSSTAESPGPGTSTPESGSASPGTSTPESGSASPGSTSESPSGTAPGTSTPESGSASPGTSTPESGSASPGSTSESPSGTAPGSTSESPSGTAPGSTSESPSGTAPGSTSSTAESPGPGTSTPESGSASPGTSTPESGSASPGSTSESPSGTAPGSTSESPSGTAPGTSTPESGSASPGSTSESPSGTAPGSTSESPSGTAPGTSTPESGSASPGTSPSGESSTAPGSTSSTAESPGPGTSPSGESSTAPGSTSSTAESPGPGTSTPESGSASPGSTSESPSGTAPGSTSSTAESPGPGTSTPESGSASPGTSTPESGSASPGFPTIPLSRLFDNAMLRAHRLHQLAFDTYQEFEEAYIPKEQKYSFLQNPQTSLCFSESIPTPSNREETQQKSNLELLRISLLLIQSWLEPVQFLRSVFANSLVYGASDSNVYDLLKDLEEGIQTLMGRLEDGSPRTGQIFKQTYSKFDTNSHNDDALLKNYGLLYCFRKDMDKVETFLRIVQCRSVEGSCGF

SEQ ID NO: 684 - DNA, 2307 bp, Artificial Sequence
  Description of Artificial Sequence: Synthetic polynucleotide
ggttctactagctctaccgctgaatctcctggcccaggttccactagctctaccgcagaatctccgggcccaggttctactagcgaatccccttctggtaccgctccaggttctactagctctaccgctgaatctccgggtccaggttctaccagctctactgcagaatctcctggcccaggtacttctactccggaaagcggttccgcttctccaggttctaccagcgaatctccttctggcaccgctccaggtacctctcctagcggcgaatcttctaccgctccaggttctactagcgaatctccttctggcactgcaccaggttctaccagcgaatctccttctggcaccgctccaggtacctctcctagcggcgaatcttctaccgctccaggttctactagcgaatctccttctggcactgcaccaggttctaccagcgaatctccttctggcaccgctccaggtacctctcctagcggcgaatcttctaccgctccaggttctactagcgaatctccttctggcactgcaccaggttctactagcgaatctccttctggcactgcaccaggttctaccagcgaatctccgtctggcactgcaccaggtacctctacccctgaaagcggttccgcttctccaggttctactagcgaatctccttctggtaccgctccaggtacttctacccctgaaagcggctccgcttctccaggttccactagctctaccgctgaatctccgggtccaggttctactagctctactgcagaatctcctggcccaggtacctctactccggaaagcggctctgcatctccaggtacttctacccctgaaagcggttctgcatctccaggttctactagcgaatccccgtctggtaccgcaccaggtacttctaccccggaaagcggctctgcttctccaggtacttctaccccggaaagcggctccgcatctccaggttctactagcgaatctccttctggtaccgctccaggttctaccagcgaatccccgtctggtactgctccaggttctaccagcgaatctccttctggtactgcaccaggttctactagctctactgcagaatctcctggcccaggtacctctactccggaaagcggctctgcatctccaggtacttctacccctgaaagcggttctgcatctccaggttctactagcgaatctccttctggcactgcaccaggttctaccagcgaatctccgtctggcactgcaccaggtacctctacccctgaaagcggttccgcttctccaggttctactagcgaatctccttctggcactgcaccaggttctaccagcgaatctccgtctggcactgcaccaggtacctctacccctgaaagcggttccgcttctccaggtacttctccgagcggtgaatcttctaccgcaccaggttctactagctctaccgctgaatctccgggcccaggtacttctccgagcggtgaatcttctactgctccaggttccactagctctactgctgaatctcctggcccaggtacttctactccggaaagcggttccgcttctccaggttctactagcgaatctccgtctggcaccgcaccaggttctactagctctactgcagaatctcctggcccaggtacctctactccggaaagcggctctgcatctccaggtacttctacccctgaaagcggttctgcatctccaggttttccgactattccgctgtctcgtctgtttgataatgctatgctgcgtgcgcaccgtctgcaccagctggcctttgatacttaccaggaatttgaagaagcctacattcctaaagagcagaagtactctttcctgcaaaacccacagacttctctctgcttcagcgaatctattccgacgccttccaatcgcgaggaaactcagcaaaagtccaatctggaactactccgcatttctctgcttctgattcagagctggctagaaccagtgcaatttctgcgttccgtcttcgccaatagcctagtttatggcgcatccgacagcaacgtatacgatctcctgaaagatctcgaggaaggcattcagaccctgatgggtcgtctcgaggatggctctccgcgtactggtcagatcttcaagcagacttactctaaatttgatactaacagccacaatgacgatgcgcttctaaaaaactatggtctgctgtattgttttcgtaaagatatggacaaagttgaaaccttcctgcgtattgttcagtgtcgttccgttgagggcagctgtggtttctaa

SEQ ID NO: 685 - protein, 817 aa, Artificial Sequence
  Description of Artificial Sequence: Synthetic polypeptide
MAEPAGSPTSTEEGTPGSGTASSSPGSSTPSGATGSPGASPGTSSTGSPGSPAGSPTSTEEGTSESATPESGPGTSTEPSEGSAPGSPAGSPTSTEEGTSTEPSEGSAPGTSTEPSEGSAPGTSESATPESGPGSEPATSGSETPGSEPATSGSETPGSPAGSPTSTEEGTSESATPESGPGTSTEPSEGSAPGTSTEPSEGSAPGSPAGSPTSTEEGTSTEPSEGSAPGTSTEPSEGSAPGTSESATPESGPGTSTEPSEGSAPGTSESATPESGPGSEPATSGSETPGTSTEPSEGSAPGTSTEPSEGSAPGTSESATPESGPGTSESATPESGPGSPAGSPTSTEEGTSESATPESGPGSEPATSGSETPGTSESATPESGPGTSTEPSEGSAPGTSTEPSEGSAPGTSTEPSEGSAPGTSTEPSEGSAPGTSTEPSEGSAPGTSTEPSEGSAPGSPAGSPTSTEEGTSTEPSEGSAPGTSESATPESGPGSEPATSGSETPGTSESATPESGPGSEPATSGSETPGTSESATPESGPGTSTEPSEGSAPGTSESATPESGPGSPAGSPTSTEEGSPAGSPTSTEEGSPAGSPTSTEEGTSESATPESGPGTSTEPSEGSAPGFPTIPLSRLFDNAMLRAHRLHQLAFDTYQEFEEAYIPKEQKYSFLQNPQTSLCFSESIPTPSNREETQQKSNLELLRISLLLIQSWLEPVQFLRSVFANSLVYGASDSNVYDLLKDLEEGIQTLMGRLEDGSPRTGQIFKQTYSKFDTNSHNDDALLKNYGLLYCFRKDMDKVETFLRIVQCRSVEGSCGF

SEQ ID NO: 686 - DNA, 2454 bp, Artificial Sequence
  Description of Artificial Sequence: Synthetic polynucleotide
atggctgaacctgctggctctccaacctccactgaggaaggtaccccgggtagcggtactgcttcttcctctccaggtagctctaccccttctggtgcaaccggctctccaggtgcttctccgggcaccagctctaccggttctccaggtagcccggctggctctcctacctctactgaggaaggtacttctgaaagcgctactcctgagtctggtccaggtacctctactgaaccgtccgaaggtagcgctccaggtagcccagcaggctctccgacttccactgaggaaggtacttctactgaaccttccgaaggcagcgcaccaggtacctctactgaaccttctgagggcagcgctccaggtacttctgaaagcgctaccccggaatctggcccaggtagcgaaccggctacttctggttctgaaaccccaggtagcgaaccggctacctccggttctgaaactccaggtagcccggcaggctctccgacctctactgaggaaggtacttctgaaagcgcaaccccggagtccggcccaggtacctctaccgaaccgtctgagggcagcgcaccaggtacttctaccgaaccgtccgagggtagcgcaccaggtagcccagcaggttctcctacctccaccgaggaaggtacttctaccgaaccgtccgagggtagcgcaccaggtacctctactgaaccttctgagggcagcgctccaggtacttctgaaagcgctaccccggagtccggtccaggtacttctactgaaccgtccgaaggtagcgcaccaggtacttctgaaagcgcaacccctgaatccggtccaggtagcgaaccggctacttctggctctgagactccaggtacttctaccgaaccgtccgaaggtagcgcaccaggtacttctactgaaccgtctgaaggtagcgcaccaggtacttctgaaagcgcaaccccggaatccggcccaggtacctctgaaagcgcaaccccggagtccggcccaggtagccctgctggctctccaacctccaccgaagaaggtacctctgaaagcgcaacccctgaatccggcccaggtagcgaaccggcaacctccggttctgaaaccccaggtacctctgaaagcgctactccggagtctggcccaggtacctctactgaaccgtctgagggtagcgctccaggtacttctactgaaccgtccgaaggtagcgcaccaggtacttctaccgaaccgtccgaaggcagcgctccaggtacctctactgaaccttccgagggcagcgctccaggtacctctaccgaaccttctgaaggtagcgcaccaggtacttctaccgaaccgtccgagggtagcgcaccaggtagcccagcaggttctcctacctccaccgaggaaggtacttctaccgaaccgtccgagggtagcgcaccaggtacctctgaaagcgcaactcctgagtctggcccaggtagcgaacctgctacctccggctctgagactccaggtacctctgaaagcgcaaccccggaatctggtccaggtagcgaacctgcaacctctggctctgaaaccccaggtacctctgaaagcgctactcctgaatctggcccaggtacttctactgaaccgtccgagggcagcgcaccaggtacttctgaaagcgctactcctgagtccggcccaggtagcccggctggctctccgacttccaccgaggaaggtagcccggctggctctccaacttctactgaagaaggtagcccggcaggctctccgacctctactgaggaaggtacttctgaaagcgcaaccccggagtccggcccaggtacctctaccgaaccgtctgagggcagcgcaccaggttttccgactattccgctgtctcgtctgtttgataatgctatgctgcgtgcgcaccgtctgcaccagctggcctttgatacttaccaggaatttgaagaagcctacattcctaaagagcagaagtactctttcctgcaaaacccacagacttctctctgcttcagcgaatctattccgacgccttccaatcgcgaggaaactcagcaaaagtccaatctggaactactccgcatttctctgcttctgattcagagctggctagaaccagtgcaatttctgcgttccgtcttcgccaatagcctagtttatggcgcatccgacagcaacgtatacgatctcctgaaagatctcgaggaaggcattcagaccctgatgggtcgtctcgaggatggctctccgcgtactggtcagatcttcaagcagacttactctaaatttgatactaacagccacaatgacgatgcgcttctaaaaaactatggtctgctgtattgttttcgtaaagatatggacaaagttgaaaccttcctgcgtattgttcagtgtcgttccgttgagggcagctgtggtttctaa

SEQ ID NO: 687 - protein, 1028 aa, Artificial Sequence
  Description of Artificial Sequence: Synthetic polypeptide
GSSESGSSEGGPGSSESGSSEGGPGESPGGSSGSESGSGGEPSESGSSGESPGGSSGSESGESPGGSSGSESGSSESGSSEGGPGSSESGSSEGGPGSSESGSSEGGPGESPGGSSGSESGESPGGSSGSESGESPGGSSGSESGSSESGSSEGGPGSSESGSSEGGPGSSESGSSEGGPGSSESGSSEGGPGSSESGSSEGGPGSSESGSSEGGPGSGGEPSESGSSGESPGGSSGSESGESPGGSSGSESGSGGEPSESGSSGSEGSSGPGESSGSSESGSSEGGPGSGGEPSESGSSGSEGSSGPGESSGSSESGSSEGGPGSGGEPSESGSSGESPGGSSGSESGSGGEPSESGSSGSGGEPSESGSSGSSESGSSEGGPGSGGEPSESGSSGSGGEPSESGSSGSEGSSGPGESSGESPGGSSGSESGSEGSSGPGESSGSEGSSGPGESSGSGGEPSESGSSGSSESGSSEGGPGSSESGSSEGGPGESPGGSSGSESGSGGEPSESGSSGSEGSSGPGESSGESPGGSSGSESGSEGSSGPGSSESGSSEGGPGSGGEPSESGSSGSEGSSGPGESSGSEGSSGPGESSGSEGSSGPGESSGSGGEPSESGSSGSGGEPSESGSSGESPGGSSGSESGESPGGSSGSESGSGGEPSESGSSGSEGSSGPGESSGESPGGSSGSESGSSESGSSEGGPGSSESGSSEGGPGSSESGSSEGGPGSGGEPSESGSSGSSESGSSEGGPGESPGGSSGSESGSGGEPSESGSSGSSESGSSEGGPGESPGGSSGSESGSGGEPSESGSSGESPGGSSGSESGSGGEPSESGSSGFPTIPLSRLFDNAMLRAHRLHQLAFDTYQEFEEAYIPKEQKYSFLQNPQTSLCFSESIPTPSNREETQQKSNLELLRISLLLIQSWLEPVQFLRSVFANSLVYGASDSNVYDLLKDLEEGIQTLMGRLEDGSPRTGQIFKQTYSKFDTNSHNDDALLKNYGLLYCFRKDMDKVETFLRIVQCRSVEGSCGF

SEQ ID NO: 688 - DNA, 3087 bp, Artificial Sequence
  Description of Artificial Sequence: Synthetic polynucleotide
ggttcctctgaaagcggttcttccgaaggtggtccaggttcctctgaaagcggttcttctgagggtggtccaggtgaatctccgggtggctccagcggttccgagtcaggttctggtggcgaaccttccgagtctggtagctcaggtgaatctccgggtggttctagcggttccgagtcaggtgaatctccgggtggttccagcggttctgagtcaggttcctccgaaagcggttcttctgagggcggtccaggttcctccgaaagcggttcttccgagggcggtccaggttcttctgaaagcggttcttccgagggcggtccaggtgaatctcctggtggttccagcggttccgagtcaggtgaatctccaggtggctctagcggttccgagtcaggtgaatctcctggtggttctagcggttctgaatcaggttcctccgaaagcggttcttctgagggcggtccaggttcctccgaaagcggttcttccgagggcggtccaggttcttctgaaagcggttcttccgagggcggtccaggttcctctgaaagcggttcttctgagggcggtccaggttcttccgaaagcggttcttccgagggcggtccaggttcttccgaaagcggttcttctgaaggcggtccaggttctggtggcgaaccgtccgagtctggtagctcaggtgaatctccgggtggctctagcggttccgagtcaggtgaatctcctggtggttccagcggttccgagtcaggttccggtggcgaaccgtccgaatctggtagctcaggtagcgaaggttcttctggtccaggcgaatcttcaggttcctctgaaagcggttcttctgagggcggtccaggttccggtggcgaaccgtccgaatctggtagctcaggtagcgaaggttcttctggtccaggcgaatcttcaggttcctctgaaagcggttcttctgagggcggtccaggttccggtggcgaaccttccgaatctggtagctcaggtgaatctccgggtggttctagcggttctgagtcaggttctggtggtgaaccttccgagtctggtagctcaggttctggtggcgaaccatccgagtctggtagctcaggttcttccgaaagcggttcttccgaaggcggtccaggttctggtggtgaaccgtccgaatctggtagctcaggttctggtggcgaaccatccgaatctggtagctcaggtagcgaaggttcttctggtcctggcgaatcttcaggtgaatctccaggtggctctagcggttccgaatcaggtagcgaaggttcttccggtccaggtgaatcttcaggtagcgaaggttcttctggtcctggtgaatcctcaggttccggtggcgaaccatctgaatctggtagctcaggttcctctgaaagcggttcttccgaaggtggtccaggttcctctgaaagcggttcttctgagggtggtccaggtgaatctccgggtggctccagcggttccgagtcaggttctggtggcgaaccatccgaatctggtagctcaggtagcgaaggttcttctggtcctggcgaatcttcaggtgaatctccaggtggctctagcggttccgaatcaggtagcgaaggttcttccggtccaggttcctctgaaagcggttcttctgagggcggtccaggttctggtggcgaaccatctgaatctggtagctcaggtagcgaaggttcttccggtccgggtgaatcttcaggtagcgaaggttcttccggtccaggtgaatcttcaggtagcgaaggttcttctggtcctggtgaatcctcaggttccggtggcgaaccatctgaatctggtagctcaggttctggtggcgaaccatccgaatctggtagctcaggtgaatctccgggtggctccagcggttctgaatcaggtgaatctcctggtggctccagcggttctgagtcaggttctggtggcgaaccatccgaatctggtagctcaggtagcgaaggttcttctggtcctggcgaatcttcaggtgaatctccaggtggctctagcggttccgaatcaggttcctctgaaagcggttcttctgagggcggtccaggttcttccgaaagcggttcttccgagggcggtccaggttcttccgaaagcggttcttctgaaggcggtccaggttctggtggcgaaccgtccgaatctggtagctcaggttcctccgaaagcggttcttctgaaggtggtccaggtgaatctccaggtggttctagcggttctgaatcaggttctggtggcgaaccgtccgaatctggtagctcaggttcctccgaaagcggttcttctgaaggtggtccaggtgaatctccaggtggttctagcggttctgaatcaggttctggtggcgaaccgtccgaatctggtagctcaggtgaatctcctggtggttccagcggttccgagtcaggttctggtggcgaaccttccgaatctggtagctcaggttttccgactattccgctgtctcgtctgtttgataatgctatgctgcgtgcgcaccgtctgcaccagctggcctttgatacttaccaggaatttgaagaagcctacattcctaaagagcagaagtactctttcctgcaaaacccacagacttctctctgcttcagcgaatctattccgacgccttccaatcgcgaggaaactcagcaaaagtccaatctggaactactccgcatttctctgcttctgattcagagctggctagaaccagtgcaatttctgcgttccgtcttcgccaatagcctagtttatggcgcatccgacagcaacgtatacgatctcctgaaagatctcgaggaaggcattcagaccctgatgggtcgtctcgaggatggctctccgcgtactggtcagatcttcaagcagacttactctaaatttgatactaacagccacaatgacgatgcgcttctaaaaaactatggtctgctgtattgttttcgtaaagatatggacaaagttgaaaccttcctgcgtattgttcagtgtcgttccgttgagggcagctgtggtttctaa

SEQ ID NO: 689 - protein, 1056 aa, Artificial Sequence
  Description of Artificial Sequence: Synthetic polypeptide
GSPAGSPTSTEEGTSESATPESGPGTSTEPSEGSAPGSPAGSPTSTEEGTSTEPSEGSAPGTSTEPSEGSAPGTSESATPESGPGSEPATSGSETPGSEPATSGSETPGSPAGSPTSTEEGTSESATPESGPGTSTEPSEGSAPGTSTEPSEGSAPGSPAGSPTSTEEGTSTEPSEGSAPGTSTEPSEGSAPGTSESATPESGPGTSTEPSEGSAPGTSESATPESGPGSEPATSGSETPGTSTEPSEGSAPGTSTEPSEGSAPGTSESATPESGPGTSESATPESGPGSPAGSPTSTEEGTSESATPESGPGSEPATSGSETPGTSESATPESGPGTSTEPSEGSAPGTSTEPSEGSAPGTSTEPSEGSAPGTSTEPSEGSAPGTSTEPSEGSAPGTSTEPSEGSAPGSPAGSPTSTEEGTSTEPSEGSAPGTSESATPESGPGSEPATSGSETPGTSESATPESGPGSEPATSGSETPGTSESATPESGPGTSTEPSEGSAPGTSESATPESGPGSPAGSPTSTEEGSPAGSPTSTEEGSPAGSPTSTEEGTSESATPESGPGTSTEPSEGSAPGTSESATPESGPGSEPATSGSETPGTSESATPESGPGSEPATSGSETPGTSESATPESGPGTSTEPSEGSAPGSPAGSPTSTEEGTSESATPESGPGSEPATSGSETPGTSESATPESGPGSPAGSPTSTEEGSPAGSPTSTEEGTSTEPSEGSAPGTSESATPESGPGTSESATPESGPGTSESATPESGPGSEPATSGSETPGSEPATSGSETPGSPAGSPTSTEEGTSTEPSEGSAPGTSTEPSEGSAPGSEPATSGSETPGTSESATPESGPGTSTEPSEGSAPGFPTIPLSRLFDNAMLRAHRLHQLAFDTYQEFEEAYIPKEQKYSFLQNPQTSLCFSESIPTPSNREETQQKSNLELLRISLLLIQSWLEPVQFLRSVFANSLVYGASDSNVYDLLKDLEEGIQTLMGRLEDGSPRTGQIFKQTYSKFDTNSHNDDALLKNYGLLYCFRKDMDKVETFLRIVQCRSVEGSCGF

SEQ ID NO: 690 - DNA, 3171 bp, Artificial Sequence
  Description of Artificial Sequence: Synthetic polynucleotide
ggtagcccggctggctctcctacctctactgaggaaggtacttctgaaagcgctactcctgagtctggtccaggtacctctactgaaccgtccgaaggtagcgctccaggtagcccagcaggctctccgacttccactgaggaaggtacttctactgaaccttccgaaggcagcgcaccaggtacctctactgaaccttctgagggcagcgctccaggtacttctgaaagcgctaccccggaatctggcccaggtagcgaaccggctacttctggttctgaaaccccaggtagcgaaccggctacctccggttctgaaactccaggtagcccggcaggctctccgacctctactgaggaaggtacttctgaaagcgcaaccccggagtccggcccaggtacctctaccgaaccgtctgagggcagcgcaccaggtacttctaccgaaccgtccgagggtagcgcaccaggtagcccagcaggttctcctacctccaccgaggaaggtacttctaccgaaccgtccgagggtagcgcaccaggtacctctactgaaccttctgagggcagcgctccaggtacttctgaaagcgctaccccggagtccggtccaggtacttctactgaaccgtccgaaggtagcgcaccaggtacttctgaaagcgcaacccctgaatccggtccaggtagcgaaccggctacttctggctctgagactccaggtacttctaccgaaccgtccgaaggtagcgcaccaggtacttctactgaaccgtctgaaggtagcgcaccaggtacttctgaaagcgcaaccccggaatccggcccaggtacctctgaaagcgcaaccccggagtccggcccaggtagccctgctggctctccaacctccaccgaagaaggtacctctgaaagcgcaacccctgaatccggcccaggtagcgaaccggcaacctccggttctgaaaccccaggtacctctgaaagcgctactccggagtctggcccaggtacctctactgaaccgtctgagggtagcgctccaggtacttctactgaaccgtccgaaggtagcgcaccaggtacttctaccgaaccgtccgaaggcagcgctccaggtacctctactgaaccttccgagggcagcgctccaggtacctctaccgaaccttctgaaggtagcgcaccaggtacttctaccgaaccgtccgagggtagcgcaccaggtagcccagcaggttctcctacctccaccgaggaaggtacttctaccgaaccgtccgagggtagcgcaccaggtacctctgaaagcgcaactcctgagtctggcccaggtagcgaacctgctacctccggctctgagactccaggtacctctgaaagcgcaaccccggaatctggtccaggtagcgaacctgcaacctctggctctgaaaccccaggtacctctgaaagcgctactcctgaatctggcccaggtacttctactgaaccgtccgagggcagcgcaccaggtacttctgaaagcgctactcctgagtccggcccaggtagcccggctggctctccgacttccaccgaggaaggtagcccggctggctctccaacttctactgaagaaggtagcccggcaggctctccgacctctactgaggaaggtacttctgaaagcgcaaccccggagtccggcccaggtacctctaccgaaccgtctgagggcagcgcaccaggtacctctgaaagcgcaactcctgagtctggcccaggtagcgaacctgctacctccggctctgagactccaggtacctctgaaagcgcaaccccggaatctggtccaggtagcgaacctgcaacctctggctctgaaaccccaggtacctctgaaagcgctactcctgaatctggcccaggtacttctactgaaccgtccgagggcagcgcaccaggtagccctgctggctctccaacctccaccgaagaaggtacctctgaaagcgcaacccctgaatccggcccaggtagcgaaccggcaacctccggttctgaaaccccaggtacttctgaaagcgctactcctgagtccggcccaggtagcccggctggctctccgacttccaccgaggaaggtagcccggctggctctccaacttctactgaagaaggtacttctaccgaaccttccgagggcagcgcaccaggtacttctgaaagcgctacccctgagtccggcccaggtacttctgaaagcgctactcctgaatccggtccaggtacttctgaaagcgctaccccggaatctggcccaggtagcgaaccggctacttctggttctgaaaccccaggtagcgaaccggctacctccggttctgaaactccaggtagcccagcaggctctccgacttccactgaggaaggtacttctactgaaccttccgaaggcagcgcaccaggtacctctactgaaccttctgagggcagcgctccaggtagcgaacctgcaacctctggctctgaaaccccaggtacctctgaaagcgctactcctgaatctggcccaggtacttctactgaaccgtccgagggcagcgcaccaggttttccgactattccgctgtctcgtctgtttgataatgctatgctgcgtgcgcaccgtctgcaccagctggcctttgatacttaccaggaatttgaagaagcctacattcctaaagagcagaagtactctttcctgcaaaacccacagacttctctctgcttcagcgaatctattccgacgccttccaatcgcgaggaaactcagcaaaagtccaatctggaactactccgcatttctctgcttctgattcagagctggctagaaccagtgcaatttctgcgttccgtcttcgccaatagcctagtttatggcgcatccgacagcaacgtatacgatctcctgaaagatctcgaggaaggcattcagaccctgatgggtcgtctcgaggatggctctccgcgtactggtcagatcttcaagcagacttactctaaatttgatactaacagccacaatgacgatgcgcttctaaaaaactatggtctgctgtattgttttcgtaaagatatggacaaagttgaaaccttcctgcgtattgttcagtgtcgttccgttgagggcagctgtggtttctaa

SEQ ID NO: 691 - protein, 1067 aa, Artificial Sequence
  Description of Artificial Sequence: Synthetic polypeptide
  MOD_RES (430)..(432): Any amino acid
  MOD_RES (443)..(446): Any amino acid
GSTSESPSGTAPGTSPSGESSTAPGSTSESPSGTAPGSTSESPSGTAPGTSTPESGSASPGTSTPESGSASPGSTSESPSGTAPGSTSESPSGTAPGTSPSGESSTAPGSTSESPSGTAPGTSPSGESSTAPGTSPSGESSTAPGSTSSTAESPGPGTSPSGESSTAPGTSPSGESSTAPGSTSSTAESPGPGTSTPESGSASPGTSTPESGSASPGSTSESPSGTAPGSTSESPSGTAPGTSTPESGSASPGSTSSTAESPGPGTSTPESGSASPGSTSESPSGTAPGTSPSGESSTAPGSTSSTAESPGPGTSPSGESSTAPGTSTPESGSASPGSTSSTAESPGPGSTSSTAESPGPGSTSSTAESPGPGSTSSTAESPGPGTSPSGESSTAPGSTSESPSGTAPGSTSESPSGTAPGTSTPESGPXXXGASASGAPSTXXXXSESPSGTAPGSTSESPSGTAPGSTSESPSGTAPGSTSESPSGTAPGSTSESPSGTAPGSTSESPSGTAPGTSTPESGSASPGTSPSGESSTAPGTSPSGESSTAPGSTSSTAESPGPGTSPSGESSTAPGTSTPESGSASPGSTSESPSGTAPGSTSESPSGTAPGTSPSGESSTAPGSTSESPSGTAPGTSTPESGSASPGTSTPESGSASPGSTSESPSGTAPGTSTPESGSASPGSTSSTAESPGPGSTSESPSGTAPGSTSESPSGTAPGTSPSGESSTAPGSTSSTAESPGPGTSPSGESSTAPGTSTPESGSASPGTSPSGESSTAPGTSPSGESSTAPGTSPSGESSTAPGSTSSTAESPGPGSTSSTAESPGPGTSPSGESSTAPGSSPSASTGTGPGSSTPSGATGSPGSSTPSGATGSPGFPTIPLSRLFDNAMLRAHRLHQLAFDTYQEFEEAYIPKEQKYSFLQNPQTSLCFSESIPTPSNREETQQKSNLELLRISLLLIQSWLEPVQFLRSVFANSLVYGASDSNVYDLLKDLEEGIQTLMGRLEDGSPRTGQIFKQTYSKFDTNSHNDDALLKNYGLLYCFRKDMDKVETFLRIVQCRSVEGSCGF

SEQ ID NO: 692 - DNA, 3204 bp, Artificial Sequence
  Description of Artificial Sequence: Synthetic polynucleotide
  modified_base (1287)..(1298): a, c, t, g, unknown or other
  modified_base (1330)..(1337): a, c, t, g, unknown or other
ggttctaccagcgaatctccttctggcaccgctccaggtacctctcctagcggcgaatcttctaccgctccaggttctactagcgaatctccttctggcactgcaccaggttctactagcgaatccccgtctggtactgctccaggtacttctactcctgaaagcggttccgcttctccaggtacctctactccggaaagcggttctgcatctccaggttctaccagcgaatctccttctggcaccgctccaggttctactagcgaatccccgtctggtaccgcaccaggtacttctcctagcggcgaatcttctaccgcaccaggttctactagcgaatctccgtctggcactgctccaggtacttctcctagcggtgaatcttctaccgctccaggtacttcccctagcggcgaatcttctaccgctccaggttctactagctctactgcagaatctccgggcccaggtacctctcctagcggtgaatcttctaccgctccaggtacttctccgagcggtgaatcttctaccgctccaggttctactagctctactgcagaatctcctggcccaggtacctctactccggaaagcggctctgcatctccaggtacttctacccctgaaagcggttctgcatctccaggttctactagcgaatctccttctggcactgcaccaggttctaccagcgaatctccgtctggcactgcaccaggtacctctacccctgaaagcggttccgcttctccaggttctaccagctctaccgcagaatctcctggtccaggtacctctactccggaaagcggctctgcatctccaggttctactagcgaatctccttctggcactgcaccaggtacttctccgagcggtgaatcttctaccgcaccaggttctactagctctaccgctgaatctccgggcccaggtacttctccgagcggtgaatcttctactgctccaggtacctctactcctgaaagcggttctgcatctccaggttccactagctctaccgcagaatctccgggcccaggttctactagctctactgctgaatctcctggcccaggttctactagctctactgctgaatctccgggtccaggttctaccagctctactgctgaatctcctggtccaggtacctccccgagcggtgaatcttctactgcaccaggttctactagcgaatctccttctggcactgcaccaggttctaccagcgaatctccgtctggcactgcaccaggtacctctacccctgaaagcggtccnnnnnnnnnnnntgcaagcgcaagcggcgcgccaagcacgggannnnnnnntagcgaatctccttctggtaccgctccaggttctaccagcgaatccccgtctggtactgctccaggttctaccagcgaatctccttctggtactgcaccaggttctactagcgaatctccttctggtaccgctccaggttctaccagcgaatccccgtctggtactgctccaggttctaccagcgaatctccttctggtactgcaccaggtacttctactccggaaagcggttccgcatctccaggtacttctcctagcggtgaatcttctactgctccaggtacctctcctagcggcgaatcttctactgctccaggttctaccagctctactgctgaatctccgggtccaggtacttccccgagcggtgaatcttctactgcaccaggtacttctactccggaaagcggttccgcttctccaggttctaccagcgaatctccttctggcaccgctccaggttctactagcgaatccccgtctggtaccgcaccaggtacttctcctagcggcgaatcttctaccgcaccaggttctactagcgaatccccgtctggtaccgcaccaggtacttctaccccggaaagcggctctgcttctccaggtacttctaccccggaaagcggctccgcatctccaggttctactagcgaatctccttctggtaccgctccaggtacttctacccctgaaagcggctccgcttctccaggttccactagctctaccgctgaatctccgggtccaggttctaccagcgaatctccttctggcaccgctccaggttctactagcgaatccccgtctggtaccgcaccaggtacttctcctagcggcgaatcttctaccgcaccaggttctaccagctctactgctgaatctccgggtccaggtacttccccgagcggtgaatcttctactgcaccaggtacttctactccggaaagcggttccgcttctccaggtacctcccctagcggcgaatcttctactgctccaggtacctctcctagcggcgaatcttctaccgctccaggtacctcccctagcggtgaatcttctaccgcaccaggttctactagctctactgctgaatctccgggtccaggttctaccagctctactgctgaatctcctggtccaggtacctccccgagcggtgaatcttctactgcaccaggttctagcccttctgcttccaccggtaccggcccaggtagctctactccgtctggtgcaactggctctccaggtagctctactccgtctggtgcaaccggctccccaggttttccgactattccgctgtctcgtctgtttgataatgctatgctgcgtgcgcaccgtctgcaccagctggcctttgatacttaccaggaatttgaagaagcctacattcctaaagagcagaagtactctttcctgcaaaacccacagacttctctctgcttcagcgaatctattccgacgccttccaatcgcgaggaaactcagcaaaagtccaatctggaactactccgcatttctctgcttctgattcagagctggctagaaccagtgcaatttctgcgttccgtcttcgccaatagcctagtttatggcgcatccgacagcaacgtatacgatctcctgaaagatctcgaggaaggcattcagaccctgatgggtcgtctcgaggatggctctccgcgtactggtcagatcttcaagcagacttactctaaatttgatactaacagccacaatgacgatgcgcttctaaaaaactatggtctgctgtattgttttcgtaaagatatggacaaagttgaaaccttcctgcgtattgttcagtgtcgttccgttgagggcagctgtggtttctaa

SEQ ID NO: 693 - protein, 1056 aa, Artificial Sequence
  Description of Artificial Sequence: Synthetic polypeptide
GASPGTSSTGSPGSSPSASTGTGPGSSPSASTGTGPGTPGSGTASSSPGSSTPSGATGSPGSNPSASTGTGPGASPGTSSTGSPGTPGSGTASSSPGSSTPSGATGSPGTPGSGTASSSPGASPGTSSTGSPGASPGTSSTGSPGTPGSGTASSSPGSSTPSGATGSPGASPGTSSTGSPGTPGSGTASSSPGSSTPSGATGSPGSNPSASTGTGPGSSPSASTGTGPGSSTPSGATGSPGSSTPSGATGSPGASPGTSSTGSPGASPGTSSTGSPGASPGTSSTGSPGTPGSGTASSSPGASPGTSSTGSPGASPGTSSTGSPGASPGTSSTGSPGSSPSASTGTGPGTPGSGTASSSPGASPGTSSTGSPGASPGTSSTGSPGASPGTSSTGSPGSSTPSGATGSPGSSTPSGATGSPGASPGTSSTGSPGTPGSGTASSSPGSSTPSGATGSPGSSTPSGATGSPGSSTPSGATGSPGSSPSASTGTGPGASPGTSSTGSPGASPGTSSTGSPGTPGSGTASSSPGASPGTSSTGSPGASPGTSSTGSPGASPGTSSTGSPGASPGTSSTGSPGTPGSGTASSSPGSSTPSGATGSPGTPGSGTASSSPGSSTPSGATGSPGTPGSGTASSSPGSSTPSGATGSPGSSTPSGATGSPGSSPSASTGTGPGSSPSASTGTGPGASPGTSSTGSPGTPGSGTASSSPGSSTPSGATGSPGSSPSASTGTGPGSSPSASTGTGPGASPGTSSTGSPGASPGTSSTGSPGSSTPSGATGSPGSSPSASTGTGPGASPGTSSTGSPGSSPSASTGTGPGTPGSGTASSSPGSSTPSGATGSPGSSTPSGATGSPGASPGTSSTGSPGFPTIPLSRLFDNAMLRAHRLHQLAFDTYQEFEEAYIPKEQKYSFLQNPQTSLCFSESIPTPSNREETQQKSNLELLRISLLLIQSWLEPVQFLRSVFANSLVYGASDSNVYDLLKDLEEGIQTLMGRLEDGSPRTGQIFKQTYSKFDTNSHNDDALLKNYGLLYCFRKDMDKVETFLRIVQCRSVEGSCGF

SEQ ID NO: 694 - DNA, 3171 bp, Artificial Sequence
  Description of Artificial Sequence: Synthetic polynucleotide
ggtgcttccccgggcaccagctctactggttctccaggttctagcccgtctgcttctactggtactggtccaggttctagcccttctgcttccactggtactggtccaggtaccccgggtagcggtaccgcttcttcttctccaggtagctctactccgtctggtgctaccggctctccaggttctaacccttctgcatccaccggtaccggcccaggtgcttctccgggcaccagctctactggttctccaggtaccccgggcagcggtaccgcatcttcttctccaggtagctctactccttctggtgcaactggttctccaggtactcctggcagcggtaccgcttcttcttctccaggtgcttctcctggtactagctctactggttctccaggtgcttctccgggcactagctctactggttctccaggtaccccgggtagcggtactgcttcttcctctccaggtagctctaccccttctggtgcaaccggctctccaggtgcttctccgggcaccagctctaccggttctccaggtaccccgggtagcggtaccgcttcttcttctccaggtagctctactccgtctggtgctaccggctctccaggttctaacccttctgcatccaccggtaccggcccaggttctagcccttctgcttccaccggtactggcccaggtagctctaccccttctggtgctaccggctccccaggtagctctactccttctggtgcaactggctctccaggtgcatctccgggcactagctctactggttctccaggtgcatcccctggcactagctctactggttctccaggtgcttctcctggtaccagctctactggttctccaggtactcctggcagcggtaccgcttcttcttctccaggtgcttctcctggtactagctctactggttctccaggtgcttctccgggcactagctctactggttctccaggtgcttccccgggcactagctctaccggttctccaggttctagcccttctgcatctactggtactggcccaggtactccgggcagcggtactgcttcttcctctccaggtgcatctccgggcactagctctactggttctccaggtgcatcccctggcactagctctactggttctccaggtgcttctcctggtaccagctctactggttctccaggtagctctactccgtctggtgcaaccggttccccaggtagctctactccttctggtgctactggctccccaggtgcatcccctggcaccagctctaccggttctccaggtaccccgggcagcggtaccgcatcttcctctccaggtagctctaccccgtctggtgctaccggttccccaggtagctctaccccgtctggtgcaaccggctccccaggtagctctactccgtctggtgcaaccggctccccaggttctagcccgtctgcttccactggtactggcccaggtgcttccccgggcaccagctctactggttctccaggtgcatccccgggtaccagctctaccggttctccaggtactcctggcagcggtactgcatcttcctctccaggtgcttctccgggcaccagctctactggttctccaggtgcatctccgggcactagctctactggttctccaggtgcatcccctggcactagctctactggttctccaggtgcttctcctggtaccagctctactggttctccaggtacccctggtagcggtactgcttcttcctctccaggtagctctactccgtctggtgctaccggttctccaggtaccccgggtagcggtaccgcatcttcttctccaggtagctctaccccgtctggtgctactggttctccaggtactccgggcagcggtactgcttcttcctctccaggtagctctaccccttctggtgctactggctctccaggtagctctaccccgtctggtgctactggctccccaggttctagcccttctgcatccaccggtaccggtccaggttctagcccgtctgcatctactggtactggtccaggtgcatccccgggcactagctctaccggttctccaggtactcctggtagcggtactgcttcttcttctccaggtagctctactccttctggtgctactggttctccaggttctagcccttctgcatccaccggtaccggcccaggttctagcccgtctgcttctaccggtactggtccaggtgcttctccgggtactagctctactggttctccaggtgcatctcctggtactagctctactggttctccaggtagctctactccgtctggtgcaaccggctctccaggttctagcccttctgcatctaccggtactggtccaggtgcatcccctggtaccagctctaccggttctccaggttctagcccttctgcttctaccggtaccggtccaggtacccctggcagcggtaccgcatcttcctctccaggtagctctactccgtctggtgcaaccggttccccaggtagctctactccttctggtgctactggctccccaggtgcatcccctggcaccagctctaccggttctccaggttttccgactattccgctgtctcgtctgtttgataatgctatgctgcgtgcgcaccgtctgcaccagctggcctttgatacttaccaggaatttgaagaagcctacattcctaaagagcagaagtactctttcctgcaaaacccacagacttctctctgcttcagcgaatctattccgacgccttccaatcgcgaggaaactcagcaaaagtccaatctggaactactccgcatttctctgcttctgattcagagctggctagaaccagtgcaatttctgcgttccgtcttcgccaatagcctagtttatggcgcatccgacagcaacgtatacgatctcctgaaagatctcgaggaaggcattcagaccctgatgggtcgtctcgaggatggctctccgcgtactggtcagatcttcaagcagacttactctaaatttgatactaacagccacaatgacgatgcgcttctaaaaaactatggtctgctgtattgttttcgtaaagatatggacaaagttgaaaccttcctgcgtattgttcagtgtcgttccgttgagggcagctgtggtttctaa

SEQ ID NO: 695 - protein, 1067 aa, Artificial Sequence
  Description of Artificial Sequence: Synthetic polypeptide
GTSTEPSEGSAPGSEPATSGSETPGSPAGSPTSTEEGSTSSTAESPGPGTSTPESGSASPGSTSESPSGTAPGSTSESPSGTAPGTSTPESGSASPGTSTPESGSASPGSEPATSGSETPGTSESATPESGPGSPAGSPTSTEEGTSTEPSEGSAPGTSESATPESGPGTSTEPSEGSAPGTSTEPSEGSAPGSPAGSPTSTEEGTSTEPSEGSAPGTSTEPSEGSAPGTSESATPESGPGTSESATPESGPGTSTEPSEGSAPGTSTEPSEGSAPGTSESATPESGPGTSTEPSEGSAPGSEPATSGSETPGSPAGSPTSTEEGSSTPSGATGSPGTPGSGTASSSPGSSTPSGATGSPGTSTEPSEGSAPGTSTEPSEGSAPGSEPATSGSETPGSPAGSPTSTEEGSPAGSPTSTEEGTSTEPSEGSAPGASASGAPSTGGTSESATPESGPGSPAGSPTSTEEGSPAGSPTSTEEGSTSSTAESPGPGSTSESPSGTAPGTSPSGESSTAPGTPGSGTASSSPGSSTPSGATGSPGSSPSASTGTGPGSEPATSGSETPGTSESATPESGPGSEPATSGSETPGSTSSTAESPGPGSTSSTAESPGPGTSPSGESSTAPGSEPATSGSETPGSEPATSGSETPGTSTEPSEGSAPGSTSSTAESPGPGTSTPESGSASPGSTSESPSGTAPGTSTEPSEGSAPGTSTEPSEGSAPGTSTEPSEGSAPGSSTPSGATGSPGSSPSASTGTGPGASPGTSSTGSPGSEPATSGSETPGTSESATPESGPGSPAGSPTSTEEGSSTPSGATGSPGSSPSASTGTGPGASPGTSSTGSPGTSESATPESGPGTSTEPSEGSAPGTSTEPSEGSAPGFPTIPLSRLFDNAMLRAHRLHQLAFDTYQEFEEAYIPKEQKYSFLQNPQTSLCFSESIPTPSNREETQQKSNLELLRISLLLIQSWLEPVQFLRSVFANSLVYGASDSNVYDLLKDLEEGIQTLMGRLEDGSPRTGQIFKQTYSKFDTNSHNDDALLKNYGLLYCFRKDMDKVETFLRIVQCRSVEGSCGF

SEQ ID NO: 696 - DNA, 3204 bp, Artificial Sequence
  Description of Artificial Sequence: Synthetic polynucleotide
ggtacttctactgaaccgtctgaaggcagcgcaccaggtagcgaaccggctacttccggttctgaaaccccaggtagcccagcaggttctccaacttctactgaagaaggttctaccagctctaccgcagaatctcctggtccaggtacctctactccggaaagcggctctgcatctccaggttctactagcgaatctccttctggcactgcaccaggttctactagcgaatccccgtctggtactgctccaggtacttctactcctgaaagcggttccgcttctccaggtacctctactccggaaagcggttctgcatctccaggtagcgaaccggcaacctccggctctgaaaccccaggtacctctgaaagcgctactcctgaatccggcccaggtagcccggcaggttctccgacttccactgaggaaggtacctctactgaaccttctgagggcagcgctccaggtacttctgaaagcgctaccccggagtccggtccaggtacttctactgaaccgtccgaaggtagcgcaccaggtacttctaccgaaccgtccgagggtagcgcaccaggtagcccagcaggttctcctacctccaccgaggaaggtacttctaccgaaccgtccgagggtagcgcaccaggtacttctaccgaaccttccgagggcagcgcaccaggtacttctgaaagcgctacccctgagtccggcccaggtacttctgaaagcgctactcctgaatccggtccaggtacctctactgaaccttccgaaggcagcgctccaggtacctctaccgaaccgtccgagggcagcgcaccaggtacttctgaaagcgcaacccctgaatccggtccaggtacttctactgaaccttccgaaggtagcgctccaggtagcgaacctgctacttctggttctgaaaccccaggtagcccggctggctctccgacctccaccgaggaaggtagctctaccccgtctggtgctactggttctccaggtactccgggcagcggtactgcttcttcctctccaggtagctctaccccttctggtgctactggctctccaggtacctctaccgaaccgtccgagggtagcgcaccaggtacctctactgaaccgtctgagggtagcgctccaggtagcgaaccggcaacctccggttctgaaactccaggtagccctgctggctctccgacttctactgaggaaggtagcccggctggttctccgacttctactgaggaaggtacttctaccgaaccttccgaaggtagcgctccaggtgcaagcgcaagcggcgcgccaagcacgggaggtacttctgaaagcgctactcctgagtccggcccaggtagcccggctggctctccgacttccaccgaggaaggtagcccggctggctctccaacttctactgaagaaggttctaccagctctaccgctgaatctcctggcccaggttctactagcgaatctccgtctggcaccgcaccaggtacttcccctagcggtgaatcttctactgcaccaggtacccctggcagcggtaccgcttcttcctctccaggtagctctaccccgtctggtgctactggctctccaggttctagcccgtctgcatctaccggtaccggcccaggtagcgaaccggcaacctccggctctgaaactccaggtacttctgaaagcgctactccggaatccggcccaggtagcgaaccggctacttccggctctgaaaccccaggttccaccagctctactgcagaatctccgggcccaggttctactagctctactgcagaatctccgggtccaggtacttctcctagcggcgaatcttctaccgctccaggtagcgaaccggcaacctctggctctgaaactccaggtagcgaacctgcaacctccggctctgaaaccccaggtacttctactgaaccttctgagggcagcgcaccaggttctaccagctctaccgcagaatctcctggtccaggtacctctactccggaaagcggctctgcatctccaggttctactagcgaatctccttctggcactgcaccaggtacttctaccgaaccgtccgaaggcagcgctccaggtacctctactgaaccttccgagggcagcgctccaggtacctctaccgaaccttctgaaggtagcgcaccaggtagctctactccgtctggtgcaaccggctccccaggttctagcccgtctgcttccactggtactggcccaggtgcttccccgggcaccagctctactggttctccaggtagcgaacctgctacctccggttctgaaaccccaggtacctctgaaagcgcaactccggagtctggtccaggtagccctgcaggttctcctacctccactgaggaaggtagctctactccgtctggtgcaaccggctccccaggttctagcccgtctgcttccactggtactggcccaggtgcttccccgggcaccagctctactggttctccaggtacctctgaaagcgctactccggagtctggcccaggtacctctactgaaccgtctgagggtagcgctccaggtacttctactgaaccgtccgaaggtagcgcaccaggttttccgactattccgctgtctcgtctgtttgataatgctatgctgcgtgcgcaccgtctgcaccagctggcctttgatacttaccaggaatttgaagaagcctacattcctaaagagcagaagtactctttcctgcaaaacccacagacttctctctgcttcagcgaatctattccgacgccttccaatcgcgaggaaactcagcaaaagtccaatctggaactactccgcatttctctgcttctgattcagagctggctagaaccagtgcaatttctgcgttccgtcttcgccaatagcctagtttatggcgcatccgacagcaacgtatacgatctcctgaaagatctcgaggaaggcattcagaccctgatgggtcgtctcgaggatggctctccgcgtactggtcagatcttcaagcagacttactctaaatttgatactaacagccacaatgacgatgcgcttctaaaaaactatggtctgctgtattgttttcgtaaagatatggacaaagttgaaaccttcctgcgtattgttcagtgtcgttccgttgagggcagctgtggtttctaa

SEQ ID NO: 697 - protein, 1105 aa, Artificial Sequence
  Description of Artificial Sequence: Synthetic polypeptide
MAEPAGSPTSTEEGTPGSGTASSSPGSSTPSGATGSPGASPGTSSTGSPGSPAGSPTSTEEGTSESATPESGPGTSTEPSEGSAPGSPAGSPTSTEEGTSTEPSEGSAPGTSTEPSEGSAPGTSESATPESGPGSEPATSGSETPGSEPATSGSETPGSPAGSPTSTEEGTSESATPESGPGTSTEPSEGSAPGTSTEPSEGSAPGSPAGSPTSTEEGTSTEPSEGSAPGTSTEPSEGSAPGTSESATPESGPGTSTEPSEGSAPGTSESATPESGPGSEPATSGSETPGTSTEPSEGSAPGTSTEPSEGSAPGTSESATPESGPGTSESATPESGPGSPAGSPTSTEEGTSESATPESGPGSEPATSGSETPGTSESATPESGPGTSTEPSEGSAPGTSTEPSEGSAPGTSTEPSEGSAPGTSTEPSEGSAPGTSTEPSEGSAPGTSTEPSEGSAPGSPAGSPTSTEEGTSTEPSEGSAPGTSESATPESGPGSEPATSGSETPGTSESATPESGPGSEPATSGSETPGTSESATPESGPGTSTEPSEGSAPGTSESATPESGPGSPAGSPTSTEEGSPAGSPTSTEEGSPAGSPTSTEEGTSESATPESGPGTSTEPSEGSAPGTSESATPESGPGSEPATSGSETPGTSESATPESGPGSEPATSGSETPGTSESATPESGPGTSTEPSEGSAPGSPAGSPTSTEEGTSESATPESGPGSEPATSGSETPGTSESATPESGPGSPAGSPTSTEEGSPAGSPTSTEEGTSTEPSEGSAPGTSESATPESGPGTSESATPESGPGTSESATPESGPGSEPATSGSETPGSEPATSGSETPGSPAGSPTSTEEGTSTEPSEGSAPGTSTEPSEGSAPGSEPATSGSETPGTSESATPESGPGTSTEPSEGSAPGFPTIPLSRLFDNAMLRAHRLHQLAFDTYQEFEEAYIPKEQKYSFLQNPQTSLCFSESIPTPSNREETQQKSNLELLRISLLLIQSWLEPVQFLRSVFANSLVYGASDSNVYDLLKDLEEGIQTLMGRLEDGSPRTGQIFKQTYSKFDTNSHNDDALLKNYGLLYCFRKDMDKVETFLRIVQCRSVEGSCGF

SEQ ID NO: 698 - DNA, 3318 bp, Artificial Sequence
  Description of Artificial Sequence: Synthetic polynucleotide
atggctgaacctgctggctctccaacctccactgaggaaggtaccccgggtagcggtactgcttcttcctctccaggtagctctaccccttctggtgcaaccggctctccaggtgcttctccgggcaccagctctaccggttctccaggtagcccggctggctctcctacctctactgaggaaggtacttctgaaagcgctactcctgagtctggtccaggtacctctactgaaccgtccgaaggtagcgctccaggtagcccagcaggctctccgacttccactgaggaaggtacttctactgaaccttccgaaggcagcgcaccaggtacctctactgaaccttctgagggcagcgctccaggtacttctgaaagcgctaccccggaatctggcccaggtagcgaaccggctacttctggttctgaaaccccaggtagcgaaccggctacctccggttctgaaactccaggtagcccggcaggctctccgacctctactgaggaaggtacttctgaaagcgcaaccccggagtccggcccaggtacctctaccgaaccgtctgagggcagcgcaccaggtacttctaccgaaccgtccgagggtagcgcaccaggtagcccagcaggttctcctacctccaccgaggaaggtacttctaccgaaccgtccgagggtagcgcaccaggtacctctactgaaccttctgagggcagcgctccaggtacttctgaaagcgctaccccggagtccggtccaggtacttctactgaaccgtccgaaggtagcgcaccaggtacttctgaaagcgcaacccctgaatccggtccaggtagcgaaccggctacttctggctctgagactccaggtacttctaccgaaccgtccgaaggtagcgcaccaggtacttctactgaaccgtctgaaggtagcgcaccaggtacttctgaaagcgcaaccccggaatccggcccaggtacctctgaaagcgcaaccccggagtccggcccaggtagccctgctggctctccaacctccaccgaagaaggtacctctgaaagcgcaacccctgaatccggcccaggtagcgaaccggcaacctccggttctgaaaccccaggtacctctgaaagcgctactccggagtctggcccaggtacctctactgaaccgtctgagggtagcgctccaggtacttctactgaaccgtccgaaggtagcgcaccaggtacttctaccgaaccgtccgaaggcagcgctccaggtacctctactgaaccttccgagggcagcgctccaggtacctctaccgaaccttctgaaggtagcgcaccaggtacttctaccgaaccgtccgagggtagcgcaccaggtagcccagcaggttctcctacctccaccgaggaaggtacttctaccgaaccgtccgagggtagcgcaccaggtacctctgaaagcgcaactcctgagtctggcccaggtagcgaacctgctacctccggctctgagactccaggtacctctgaaagcgcaaccccggaatctggtccaggtagcgaacctgcaacctctggctctgaaaccccaggtacctctgaaagcgctactcctgaatctggcccaggtacttctactgaaccgtccgagggcagcgcaccaggtacttctgaaagcgctactcctgagtccggcccaggtagcccggctggctctccgacttccaccgaggaaggtagcccggctggctctccaacttctactgaagaaggtagcccggcaggctctccgacctctactgaggaaggtacttctgaaagcgcaaccccggagtccggcccaggtacctctaccgaaccgtctgagggcagcgcaccaggtacctctgaaagcgcaactcctgagtctggcccaggtagcgaacctgctacctccggctctgagactccaggtacctctgaaagcgcaaccccggaatctggtccaggtagcgaacctgcaacctctggctctgaaaccccaggtacctctgaaagcgctactcctgaatctggcccaggtacttctactgaaccgtccgagggcagcgcaccaggtagccctgctggctctccaacctccaccgaagaaggtacctctgaaagcgcaacccctgaatccggcccaggtagcgaaccggcaacctccggttctgaaaccccaggtacttctgaaagcgctactcctgagtccggcccaggtagcccggctggctctccgacttccaccgaggaaggtagcccggctggctctccaacttctactgaagaaggtacttctaccgaaccttccgagggcagcgcaccaggtacttctgaaagcgctacccctgagtccggcccaggtacttctgaaagcgctactcctgaatccggtccaggtacttctgaaagcgctaccccggaatctggcccaggtagcgaaccggctacttctggttctgaaaccccaggtagcgaaccggctacctccggttctgaaactccaggtagcccagcaggctctccgacttccactgaggaaggtacttctactgaaccttccgaaggcagcgcaccaggtacctctactgaaccttctgagggcagcgctccaggtagcgaacctgcaacctctggctctgaaaccccaggtacctctgaaagcgctactcctgaatctggcccaggtacttctactgaaccgtccgagggcagcgcaccaggttttccgactattccgctgtctcgtctgtttgataatgctatgctgcgtgcgcaccgtctgcaccagctggcctttgatacttaccaggaatttgaagaagcctacattcctaaagagcagaagtactctttcctgcaaaacccacagacttctctctgcttcagcgaatctattccgacgccttccaatcgcgaggaaactcagcaaaagtccaatctggaactactccgcatttctctgcttctgattcagagctggctagaaccagtgcaatttctgcgttccgtcttcgccaatagcctagtttatggcgcatccgacagcaacgtatacgatctcctgaaagatctcgaggaaggcattcagaccctgatgggtcgtctcgaggatggctctccgcgtactggtcagatcttcaagcagacttactctaaatttgatactaacagccacaatgacgatgcgcttctaaaaaactatggtctgctgtattgttttcgtaaagatatggacaaagttgaaaccttcctgcgtattgttcagtgtcgttccgttgagggcagctgtggtttctaa

SEQ ID NO: 699 - protein, 1116 aa, Artificial Sequence
  Description of Artificial Sequence: Synthetic polypeptide
MAEPAGSPTSTEEGASPGTSSTGSPGSSTPSGATGSPGSSTPSGATGSPGTSTEPSEGSAPGSEPATSGSETPGSPAGSPTSTEEGSTSSTAESPGPGTSTPESGSASPGSTSESPSGTAPGSTSESPSGTAPGTSTPESGSASPGTSTPESGSASPGSEPATSGSETPGTSESATPESGPGSPAGSPTSTEEGTSTEPSEGSAPGTSESATPESGPGTSTEPSEGSAPGTSTEPSEGSAPGSPAGSPTSTEEGTSTEPSEGSAPGTSTEPSEGSAPGTSESATPESGPGTSESATPESGPGTSTEPSEGSAPGTSTEPSEGSAPGTSESATPESGPGTSTEPSEGSAPGSEPATSGSETPGSPAGSPTSTEEGSSTPSGATGSPGTPGSGTASSSPGSSTPSGATGSPGTSTEPSEGSAPGTSTEPSEGSAPGSEPATSGSETPGSPAGSPTSTEEGSPAGSPTSTEEGTSTEPSEGSAPGASASGAPSTGGTSESATPESGPGSPAGSPTSTEEGSPAGSPTSTEEGSTSSTAESPGPGSTSESPSGTAPGTSPSGESSTAPGTPGSGTASSSPGSSTPSGATGSPGSSPSASTGTGPGSEPATSGSETPGTSESATPESGPGSEPATSGSETPGSTSSTAESPGPGSTSSTAESPGPGTSPSGESSTAPGSEPATSGSETPGSEPATSGSETPGTSTEPSEGSAPGSTSSTAESPGPGTSTPESGSASPGSTSESPSGTAPGTSTEPSEGSAPGTSTEPSEGSAPGTSTEPSEGSAPGSSTPSGATGSPGSSPSASTGTGPGASPGTSSTGSPGSEPATSGSETPGTSESATPESGPGSPAGSPTSTEEGSSTPSGATGSPGSSPSASTGTGPGASPGTSSTGSPGTSESATPESGPGTSTEPSEGSAPGTSTEPSEGSAPGFPTIPLSRLFDNAMLRAHRLHQLAFDTYQEFEEAYIPKEQKYSFLQNPQTSLCFSESIPTPSNREETQQKSNLELLRISLLLIQSWLEPVQFLRSVFANSLVYGASDSNVYDLLKDLEEGIQTLMGRLEDGSPRTGQIFKQTYSKFDTNSHNDDALLKNYGLLYCFRKDMDKVETFLRIVQCRSVEGSCGF

SEQ ID NO: 700 - DNA, 3351 bp, Artificial Sequence
  Description of Artificial Sequence: Synthetic polynucleotide
atggctgaacctgctggctctccaacctccactgaggaaggtgcatccccgggcaccagctctaccggttctccaggtagctctaccccgtctggtgctaccggctctccaggtagctctaccccgtctggtgctactggctctccaggtacttctactgaaccgtctgaaggcagcgcaccaggtagcgaaccggctacttccggttctgaaaccccaggtagcccagcaggttctccaacttctactgaagaaggttctaccagctctaccgcagaatctcctggtccaggtacctctactccggaaagcggctctgcatctccaggttctactagcgaatctccttctggcactgcaccaggttctactagcgaatccccgtctggtactgctccaggtacttctactcctgaaagcggttccgcttctccaggtacctctactccggaaagcggttctgcatctccaggtagcgaaccggcaacctccggctctgaaaccccaggtacctctgaaagcgctactcctgaatccggcccaggtagcccggcaggttctccgacttccactgaggaaggtacctctactgaaccttctgagggcagcgctccaggtacttctgaaagcgctaccccggagtccggtccaggtacttctactgaaccgtccgaaggtagcgcaccaggtacttctaccgaaccgtccgagggtagcgcaccaggtagcccagcaggttctcctacctccaccgaggaaggtacttctaccgaaccgtccgagggtagcgcaccaggtacttctaccgaaccttccgagggcagcgcaccaggtacttctgaaagcgctacccctgagtccggcccaggtacttctgaaagcgctactcctgaatccggtccaggtacctctactgaaccttccgaaggcagcgctccaggtacctctaccgaaccgtccgagggcagcgcaccaggtacttctgaaagcgcaacccctgaatccggtccaggtacttctactgaaccttccgaaggtagcgctccaggtagcgaacctgctacttctggttctgaaaccccaggtagcccggctggctctccgacctccaccgaggaaggtagctctaccccgtctggtgctactggttctccaggtactccgggcagcggtactgcttcttcctctccaggtagctctaccccttctggtgctactggctctccaggtacctctaccgaaccgtccgagggtagcgcaccaggtacctctactgaaccgtctgagggtagcgctccaggtagcgaaccggcaacctccggttctgaaactccaggtagccctgctggctctccgacttctactgaggaaggtagcccggctggttctccgacttctactgaggaaggtacttctaccgaaccttccgaaggtagcgctccaggtgcaagcgcaagcggcgcgccaagcacgggaggtacttctgaaagcgctactcctgagtccggcccaggtagcccggctggctctccgacttccaccgaggaaggtagcccggctggctctccaacttctactgaagaaggttctaccagctctaccgctgaatctcctggcccaggttctactagcgaatctccgtctggcaccgcaccaggtacttcccctagcggtgaatcttctactgcaccaggtacccctggcagcggtaccgcttcttcctctccaggtagctctaccccgtctggtgctactggctctccaggttctagcccgtctgcatctaccggtaccggcccaggtagcgaaccggcaacctccggctctgaaactccaggtacttctgaaagcgctactccggaatccggcccaggtagcgaaccggctacttccggctctgaaaccccaggttccaccagctctactgcagaatctccgggcccaggttctactagctctactgcagaatctccgggtccaggtacttctcctagcggcgaatcttctaccgctccaggtagcgaaccggcaacctctggctctgaaactccaggtagcgaacctgcaacctccggctctgaaaccccaggtacttctactgaaccttctgagggcagcgcaccaggttctaccagctctaccgcagaatctcctggtccaggtacctctactccggaaagcggctctgcatctccaggttctactagcgaatctccttctggcactgcaccaggtacttctaccgaaccgtccgaaggcagcgctccaggtacctctactgaaccttccgagggcagcgctccaggtacctctaccgaaccttctgaaggtagcgcaccaggtagctctactccgtctggtgcaaccggctccccaggttctagcccgtctgcttccactggtactggcccaggtgcttccccgggcaccagctctactggttctccaggtagcgaacctgctacctccggttctgaaaccccaggtacctctgaaagcgcaactccggagtctggtccaggtagccctgcaggttctcctacctccactgaggaaggtagctctactccgtctggtgcaaccggctccccaggttctagcccgtctgcttccactggtactggcccaggtgcttccccgggcaccagctctactggttctccaggtacctctgaaagcgctactccggagtctggcccaggtacctctactgaaccgtctgagggtagcgctccaggtacttctactgaaccgtccgaaggtagcgcaccaggttttccgactattccgctgtctcgtctgtttgataatgctatgctgcgtgcgcaccgtctgcaccagctggcctttgatacttaccaggaatttgaagaagcctacattcctaaagagcagaagtactctttcctgcaaaacccacagacttctctctgcttcagcgaatctattccgacgccttccaatcgcgaggaaactcagcaaaagtccaatctggaactactccgcatttctctgcttctgattcagagctggctagaaccagtgcaatttctgcgttccgtcttcgccaatagcctagtttatggcgcatccgacagcaacgtatacgatctcctgaaagatctcgaggaaggcattcagaccctgatgggtcgtctcgaggatggctctccgcgtactggtcagatcttcaagcagacttactctaaatttgatactaacagccacaatgacgatgcgcttctaaaaaactatggtctgctgtattgttttcgtaaagatatggacaaagttgaaaccttcctgcgtattgttcagtgtcgttccgttgagggcagctgtggtttctaa

SEQ ID NO: 701 - protein, 1510 aa, Artificial Sequence
  Description of Artificial Sequence: Synthetic polypeptide
GTSTEPSEGSAPGSEPATSGSETPGSPAGSPTSTEEGSTSSTAESPGPGTSTPESGSASPGSTSESPSGTAPGSTSESPSGTAPGTSTPESGSASPGTSTPESGSASPGSEPATSGSETPGTSESATPESGPGSPAGSPTSTEEGTSTEPSEGSAPGTSESATPESGPGTSTEPSEGSAPGTSTEPSEGSAPGSPAGSPTSTEEGTSTEPSEGSAPGTSTEPSEGSAPGTSESATPESGPGTSESATPESGPGTSTEPSEGSAPGTSTEPSEGSAPGTSESATPESGPGTSTEPSEGSAPGSEPATSGSETPGSPAGSPTSTEEGSSTPSGATGSPGTPGSGTASSSPGSSTPSGATGSPGTSTEPSEGSAPGTSTEPSEGSAPGSEPATSGSETPGSPAGSPTSTEEGSPAGSPTSTEEGTSTEPSEGSAPGPEPTGPAPSGGSEPATSGSETPGTSESATPESGPGSPAGSPTSTEEGTSESATPESGPGSPAGSPTSTEEGSPAGSPTSTEEGTSESATPESGPGSPAGSPTSTEEGSPAGSPTSTEEGSTSSTAESPGPGSTSESPSGTAPGTSPSGESSTAPGSTSESPSGTAPGSTSESPSGTAPGTSPSGESSTAPGTSTEPSEGSAPGTSESATPESGPGTSESATPESGPGSEPATSGSETPGTSESATPESGPGTSESATPESGPGTSTEPSEGSAPGTSESATPESGPGTSTEPSEGSAPGTSPSGESSTAPGTSPSGESSTAPGTSPSGESSTAPGTSTEPSEGSAPGSPAGSPTSTEEGTSTEPSEGSAPGSSPSASTGTGPGSSTPSGATGSPGSSTPSGATGSPGSSTPSGATGSPGSSTPSGATGSPGASPGTSSTGSPGASASGAPSTGGTSPSGESSTAPGSTSSTAESPGPGTSPSGESSTAPGTSESATPESGPGTSTEPSEGSAPGTSTEPSEGSAPGSSPSASTGTGPGSSTPSGATGSPGASPGTSSTGSPGTSTPESGSASPGTSPSGESSTAPGTSPSGESSTAPGTSESATPESGPGSEPATSGSETPGTSTEPSEGSAPGSTSESPSGTAPGSTSESPSGTAPGTSTPESGSASPGSPAGSPTSTEEGTSESATPESGPGTSTEPSEGSAPGSPAGSPTSTEEGTSESATPESGPGSEPATSGSETPGSSTPSGATGSPGASPGTSSTGSPGSSTPSGATGSPGSTSESPSGTAPGTSPSGESSTAPGSTSSTAESPGPGSSTPSGATGSPGASPGTSSTGSPGTPGSGTASSSPGSPAGSPTSTEEGSPAGSPTSTEEGTSTEPSEGSAPGFPTIPLSRLFDNAMLRAHRLHQLAFDTYQEFEEAYIPKEQKYSFLQNPQTSLCFSESIPTPSNREETQQKSNLELLRISLLLIQSWLEPVQFLRSVFANSLVYGASDSNVYDLLKDLEEGIQTLMGRLEDGSPRTGQIFKQTYSKFDTNSHNDDALLKNYGLLYCFRKDMDKVETFLRIVQCRSVEGSCGF

SEQ ID NO: 702 - DNA, 4533 bp, Artificial Sequence
  Description of Artificial Sequence: Synthetic polynucleotide
ggtacttctactgaaccgtctgaaggcagcgcaccaggtagcgaaccggctacttccggttctgaaaccccaggtagcccagcaggttctccaacttctactgaagaaggttctaccagctctaccgcagaatctcctggtccaggtacctctactccggaaagcggctctgcatctccaggttctactagcgaatctccttctggcactgcaccaggttctactagcgaatccccgtctggtactgctccaggtacttctactcctgaaagcggttccgcttctccaggtacctctactccggaaagcggttctgcatctccaggtagcgaaccggcaacctccggctctgaaaccccaggtacctctgaaagcgctactcctgaatccggcccaggtagcccggcaggttctccgacttccactgaggaaggtacctctactgaaccttctgagggcagcgctccaggtacttctgaaagcgctaccccggagtccggtccaggtacttctactgaaccgtccgaaggtagcgcaccaggtacttctaccgaaccgtccgagggtagcgcaccaggtagcccagcaggttctcctacctccaccgaggaaggtacttctaccgaaccgtccgagggtagcgcaccaggtacttctaccgaaccttccgagggcagcgcaccaggtacttctgaaagcgctacccctgagtccggcccaggtacttctgaaagcgctactcctgaatccggtccaggtacctctactgaaccttccgaaggcagcgctccaggtacctctaccgaaccgtccgagggcagcgcaccaggtacttctgaaagcgcaacccctgaatccggtccaggtacttctactgaaccttccgaaggtagcgctccaggtagcgaacctgctacttctggttctgaaaccccaggtagcccggctggctctccgacctccaccgaggaaggtagctctaccccgtctggtgctactggttctccaggtactccgggcagcggtactgcttcttcctctccaggtagctctaccccttctggtgctactggctctccaggtacctctaccgaaccgtccgagggtagcgcaccaggtacctctactgaaccgtctgagggtagcgctccaggtagcgaaccggcaacctccggttctgaaactccaggtagccctgctggctctccgacttctactgaggaaggtagcccggctggttctccgacttctactgaggaaggtacttctaccgaaccttccgaaggtagcgctccaggtccagaaccaacggggccggccccaagcggaggtagcgaaccggcaacctccggctctgaaaccccaggtacctctgaaagcgctactcctgaatccggcccaggtagcccggcaggttctccgacttccactgaggaaggtacttctgaaagcgctactcctgagtccggcccaggtagcccggctggctctccgacttccaccgaggaaggtagcccggctggctctccaacttctactgaagaaggtacttctgaaagcgctactcctgagtccggcccaggtagcccggctggctctccgacttccaccgaggaaggtagcccggctggctctccaacttctactgaagaaggttctaccagctctaccgctgaatctcctggcccaggttctactagcgaatctccgtctggcaccgcaccaggtacttcccctagcggtgaatcttctactgcaccaggttctaccagcgaatctccttctggcaccgctccaggttctactagcgaatccccgtctggtaccgcaccaggtacttctcctagcggcgaatcttctaccgcaccaggtacttctaccgaaccttccgagggcagcgcaccaggtacttctgaaagcgctacccctgagtccggcccaggtacttctgaaagcgctactcctgaatccggtccaggtagcgaaccggcaacctctggctctgaaaccccaggtacctctgaaagcgctactccggaatctggtccaggtacttctgaaagcgctactccggaatccggtccaggtacctctactgaaccttctgagggcagcgctccaggtacttctgaaagcgctaccccggagtccggtccaggtacttctactgaaccgtccgaaggtagcgcaccaggtacctcccctagcggcgaatcttctactgctccaggtacctctcctagcggcgaatcttctaccgctccaggtacctcccctagcggtgaatcttctaccgcaccaggtacttctaccgaaccgtccgagggtagcgcaccaggtagcccagcaggttctcctacctccaccgaggaaggtacttctaccgaaccgtccgagggtagcgcaccaggttctagcccttctgcttccaccggtaccggcccaggtagctctactccgtctggtgcaactggctctccaggtagctctactccgtctggtgcaaccggctccccaggtagctctaccccgtctggtgctaccggctctccaggtagctctaccccgtctggtgcaaccggctccccaggtgcatccccgggtactagctctaccggttctccaggtgcaagcgcaagcggcgcgccaagcacgggaggtacttctccgagcggtgaatcttctaccgcaccaggttctactagctctaccgctgaatctccgggcccaggtacttctccgagcggtgaatcttctactgctccaggtacctctgaaagcgctactccggagtctggcccaggtacctctactgaaccgtctgagggtagcgctccaggtacttctactgaaccgtccgaaggtagcgcaccaggttctagcccttctgcatctactggtactggcccaggtagctctactccttctggtgctaccggctctccaggtgcttctccgggtactagctctaccggttctccaggtacttctactccggaaagcggttccgcatctccaggtacttctcctagcggtgaatcttctactgctccaggtacctctcctagcggcgaatcttctactgctccaggtacttctgaaagcgcaacccctgaatccggtccaggtagcgaaccggctacttctggctctgagactccaggtacttctaccgaaccgtccgaaggtagcgcaccaggttctaccagcgaatccccttctggtactgctccaggttctaccagcgaatccccttctggcaccgcaccaggtacttctacccctgaaagcggctccgcttctccaggtagcccggcaggctctccgacctctactgaggaaggtacttctgaaagcgcaaccccggagtccggcccaggtacctctaccgaaccgtctgagggcagcgcaccaggtagccctgctggctctccaacctccaccgaagaaggtacctctgaaagcgcaacccctgaatccggcccaggtagcgaaccggcaacctccggttctgaaaccccaggtagctctaccccgtctggtgctaccggttccccaggtgcttctcctggtactagctctaccggttctccaggtagctctaccccgtctggtgctactggctctccaggttctactagcgaatccccgtctggtactgctccaggtacttcccctagcggtgaatcttctactgctccaggttctaccagctctaccgcagaatctccgggtccaggtagctctaccccttctggtgcaaccggctctccaggtgcatccccgggtaccagctctaccggttctccaggtactccgggtagcggtaccgcttcttcctctccaggtagccctgctggctctccgacttctactgaggaaggtagcccggctggttctccgacttctactgaggaaggtacttctaccgaaccttccgaaggtagcgctccaggttttccgactattccgctgtctcgtctgtttgataatgctatgctgcgtgcgcaccgtctgcaccagctggcctttgatacttaccaggaatttgaagaagcctacattcctaaagagcagaagtactctttcctgcaaaacccacagacttctctctgcttcagcgaatctattccgacgccttccaatcgcgaggaaactcagcaaaagtccaatctggaactactccgcatttctctgcttctgattcagagctggctagaaccagtgcaatttctgcgttccgtcttcgccaatagcctagtttatggcgcatccgacagcaacgtatacgatctcctgaaagatctcgaggaaggcattcagaccctgatgggtcgtctcgaggatggctctccgcgtactggtcagatcttcaagcagacttactctaaatttgatactaacagccacaatgacgatgcgcttctaaaaaactatggtctgctgtattgttttcgtaaagatatggacaaagttgaaaccttcctgcgtattgttcagtgtcgttccgttgagggcagctgtggtttctaa

SEQ ID NO: 703 - protein, 336 aa, Artificial Sequence
  Description of Artificial Sequence: Synthetic polypeptide
FPTIPLSRLFDNAMLRAHRLHQLAFDTYQEFEEAYIPKEQKYSFLQNPQTSLCFSESIPTPSNREETQQKSNLELLRISLLLIQSWLEPVQFLRSVFANSLVYGASDSNVYDLLKDLEEGIQTLMGRLEDGSPRTGQIFKQTYSKFDTNSHNDDALLKNYGLLYCFRKDMDKVETFLRIVQCRSVEGSCGFGGSEPATSGSETPGTSESATPESGPGSEPATSGSETPGSPAGSPTSTEEGTSTEPSEGSAPGSEPATSGSETPGSEPATSGSETPGSEPATSGSETPGTSTEPSEGSAPGTSESATPESGPGSEPATSGSETPGTSTEPSEGSAP

SEQ ID NO: 704 - DNA, 1011 bp, Artificial Sequence
  Description of Artificial Sequence: Synthetic polynucleotide
tttccgactattccgctgtctcgtctgtttgataatgctatgctgcgtgcgcaccgtctgcaccagctggcctttgatacttaccaggaatttgaagaagcctacattcctaaagagcagaagtactctttcctgcaaaacccacagacttctctctgcttcagcgaatctattccgacgccttccaatcgcgaggaaactcagcaaaagtccaatctggaactactccgcatttctctgcttctgattcagagctggctagaaccagtgcaatttctgcgttccgtcttcgccaatagcctagtttatggcgcatccgacagcaacgtatacgatctcctgaaagatctcgaggaaggcattcagaccctgatgggtcgtctcgaggatggctctccgcgtactggtcagatcttcaagcagacttactctaaatttgatactaacagccacaatgacgatgcgcttctaaaaaactatggtctgctgtattgttttcgtaaagatatggacaaagttgaaaccttcctgcgtattgttcagtgtcgttccgttgagggcagctgtggtttctaaggtggtagcgaaccggcaacttccggctctgaaaccccaggtacttctgaaagcgctactcctgagtctggcccaggtagcgaacctgctacctctggctctgaaaccccaggtagcccggcaggctctccgacttccaccgaggaaggtacctctactgaaccttctgagggtagcgctccaggtagcgaaccggcaacctctggctctgaaaccccaggtagcgaacctgctacctccggctctgaaactccaggtagcgaaccggctacttccggttctgaaactccaggtacctctaccgaaccttccgaaggcagcgcaccaggtacttctgaaagcgcaacccctgaatccggtccaggtagcgaaccggctacttctggctctgagactccaggtacttctaccgaaccgtccgaaggtagcgcacca

SEQ ID NO: 705 - protein, 480 aa, Artificial Sequence
  Description of Artificial Sequence: Synthetic polypeptide
FPTIPLSRLFDNAMLRAHRLHQLAFDTYQEFEEAYIPKEQKYSFLQNPQTSLCFSESIPTPSNREETQQKSNLELLRISLLLIQSWLEPVQFLRSVFANSLVYGASDSNVYDLLKDLEEGIQTLMGRLEDGSPRTGQIFKQTYSKFDTNSHNDDALLKNYGLLYCFRKDMDKVETFLRIVQCRSVEGSCGFGGTSESATPESGPGSEPATSGSETPGTSESATPESGPGSEPATSGSETPGTSESATPESGPGTSTEPSEGSAPGSPAGSPTSTEEGTSESATPESGPGSEPATSGSETPGTSESATPESGPGSPAGSPTSTEEGSPAGSPTSTEEGTSTEPSEGSAPGTSESATPESGPGTSESATPESGPGTSESATPESGPGSEPATSGSETPGSEPATSGSETPGSPAGSPTSTEEGTSTEPSEGSAPGTSTEPSEGSAPGSEPATSGSETPGTSESATPESGPGTSTEPSEGSAP

SEQ ID NO: 706 - DNA, 1443 bp, Artificial Sequence
  Description of Artificial Sequence: Synthetic polynucleotide
tttccgactattccgctgtctcgtctgtttgataatgctatgctgcgtgcgcaccgtctgcaccagctggcctttgatacttaccaggaatttgaagaagcctacattcctaaagagcagaagtactctttcctgcaaaacccacagacttctctctgcttcagcgaatctattccgacgccttccaatcgcgaggaaactcagcaaaagtccaatctggaactactccgcatttctctgcttctgattcagagctggctagaaccagtgcaatttctgcgttccgtcttcgccaatagcctagtttatggcgcatccgacagcaacgtatacgatctcctgaaagatctcgaggaaggcattcagaccctgatgggtcgtctcgaggatggctctccgcgtactggtcagatcttcaagcagacttactctaaatttgatactaacagccacaatgacgatgcgcttctaaaaaactatggtctgctgtattgttttcgtaaagatatggacaaagttgaaaccttcctgcgtattgttcagtgtcgttccgttgagggcagctgtggtttctaaggtggtacctctgaaagcgcaactcctgagtctggcccaggtagcgaacctgctacctccggctctgagactccaggtacctctgaaagcgcaaccccggaatctggtccaggtagcgaacctgcaacctctggctctgaaaccccaggtacctctgaaagcgctactcctgaatctggcccaggtacttctactgaaccgtccgagggcagcgcaccaggtagccctgctggctctccaacctccaccgaagaaggtacctctgaaagcgcaacccctgaatccggcccaggtagcgaaccggcaacctccggttctgaaaccccaggtacttctgaaagcgctactcctgagtccggcccaggtagcccggctggctctccgacttccaccgaggaaggtagcccggctggctctccaacttctactgaagaaggtacttctaccgaaccttccgagggcagcgcaccaggtacttctgaaagcgctacccctgagtccggcccaggtacttctgaaagcgctactcctgaatccggtccaggtacttctgaaagcgctaccccggaatctggcccaggtagcgaaccggctacttctggttctgaaaccccaggtagcgaaccggctacctccggttctgaaactccaggtagcccagcaggctctccgacttccactgaggaaggtacttctactgaaccttccgaaggcagcgcaccaggtacctctactgaaccttctgagggcagcgctccaggtagcgaacctgcaacctctggctctgaaaccccaggtacctctgaaagcgctactcctgaatctggcccaggtacttctactgaaccgtccgagggcagcgcacca

SEQ ID NO: 707 - protein, 336 aa, Artificial Sequence
  Description of Artificial Sequence: Synthetic polypeptide
FPTIPLSRLFDNAMLRAHRLHQLAFDTYQEFEEAYIPKEQKYSFLQNPQTSLCFSESIPTPSNREETQQKSNLELLRISLLLIQSWLEPVQFLRSVFANSLVYGASDSNVYDLLKDLEEGIQTLMGRLEDGSPRTGQIFKQTYSKFDTNSHNDDALLKNYGLLYCFRKDMDKVETFLRIVQCRSVEGSCGFGGTSTPESGSASPGTSPSGESSTAPGTSPSGESSTAPGSTSSTAESPGPGSTSESPSGTAPGSTSSTAESPGPGTSPSGESSTAPGTSTPESGSASPGSTSSTAESPGPGTSPSGESSTAPGTSPSGESSTAPGTSPSGESSTAP

SEQ ID NO: 708 - DNA, 1011 bp, Artificial Sequence
  Description of Artificial Sequence: Synthetic polynucleotide
tttccgactattccgctgtctcgtctgtttgataatgctatgctgcgtgcgcaccgtctgcaccagctggcctttgatacttaccaggaatttgaagaagcctacattcctaaagagcagaagtactctttcctgcaaaacccacagacttctctctgcttcagcgaatctattccgacgccttccaatcgcgaggaaactcagcaaaagtccaatctggaactactccgcatttctctgcttctgattcagagctggctagaaccagtgcaatttctgcgttccgtcttcgccaatagcctagtttatggcgcatccgacagcaacgtatacgatctcctgaaagatctcgaggaaggcattcagaccctgatgggtcgtctcgaggatggctctccgcgtactggtcagatcttcaagcagacttactctaaatttgatactaacagccacaatgacgatgcgcttctaaaaaactatggtctgctgtattgttttcgtaaagatatggacaaagttgaaaccttcctgcgtattgttcagtgtcgttccgttgagggcagctgtggtttctaaggtggtacttctactccggaaagcggttccgcatctccaggtacttctcctagcggtgaatcttctactgctccaggtacctctcctagcggcgaatcttctactgctccaggttctaccagctctaccgctgaatctcctggcccaggttctaccagcgaatccccgtctggcaccgcaccaggttctactagctctaccgcagaatctccgggtccaggtacttcccctagcggtgaatcttctactgctccaggtacctctactccggaaagcggctccgcatctccaggttctactagctctactgctgaatctcctggtccaggtacctcccctagcggcgaatcttctactgctccaggtacctctcctagcggcgaatcttctaccgctccaggtacctcccctagcggtgaatcttctaccgcacca

SEQ ID NO: 709 - protein, 768 aa, Artificial Sequence
  Description of Artificial Sequence: Synthetic polypeptide
FPTIPLSRLFDNAMLRAHRLHQLAFDTYQEFEEAYIPKEQKYSFLQNPQTSLCFSESIPTPSNREETQQKSNLELLRISLLLIQSWLEPVQFLRSVFANSLVYGASDSNVYDLLKDLEEGIQTLMGRLEDGSPRTGQIFKQTYSKFDTNSHNDDALLKNYGLLYCFRKDMDKVETFLRIVQCRSVEGSCGFGGSSESGSSEGGPGSGGEPSESGSSGSSESGSSEGGPGSSESGSSEGGPGSSESGSSEGGPGSSESGSSEGGPGSSESGSSEGGPGESPGGSSGSESGSEGSSGPGESSGSSESGSSEGGPGSSESGSSEGGPGSSESGSSEGGPGSGGEPSESGSSGESPGGSSGSESGESPGGSSGSESGSGGEPSESGSSGSSESGSSEGGPGSGGEPSESGSSGSGGEPSESGSSGSEGSSGPGESSGESPGGSSGSESGSGGEPSESGSSGSGGEPSESGSSGSGGEPSESGSSGSSESGSSEGGPGESPGGSSGSESGESPGGSSGSESGESPGGSSGSESGESPGGSSGSESGESPGGSSGSESGSSESGSSEGGPGSGGEPSESGSSGSEGSSGPGESSGSSESGSSEGGPGSGGEPSESGSSGSSESGSSEGGPGSGGEPSESGSSGESPGGSSGSESGESPGGSSGSESGSSESGSSEGGPGSGGEPSESGSSGSSESGSSEGGPGSGGEPSESGSSGSGGEPSESGSSGESPGGSSGSESGSEGSSGPGESSGSSESGSSEGGPGSEGSSGPGESS

SEQ ID NO: 710 - DNA, 2307 bp, Artificial Sequence
  Description of Artificial Sequence: Synthetic polynucleotide
tttccgactattccgctgtctcgtctgtttgataatgctatgctgcgtgcgcaccgtctgcaccagctggcctttgatacttaccaggaatttgaagaagcctacattcctaaagagcagaagtactctttcctgcaaaacccacagacttctctctgcttcagcgaatctattccgacgccttccaatcgcgaggaaactcagcaaaagtccaatctggaactactccgcatttctctgcttctgattcagagctggctagaaccagtgcaatttctgcgttccgtcttcgccaatagcctagtttatggcgcatccgacagcaacgtatacgatctcctgaaagatctcgaggaaggcattcagaccctgatgggtcgtctcgaggatggctctccgcgtactggtcagatcttcaagcagacttactctaaatttgatactaacagccacaatgacgatgcgcttctaaaaaactatggtctgctgtattgttttcgtaaagatatggacaaagttgaaaccttcctgcgtattgttcagtgtcgttccgttgagggcagctgtggtttctaaggtggttcctctgaaagcggttcttccgaaggtggtccaggttcctctgaaagcggttcttctgagggtggtccaggtgaatctccgggtggctccagcggttccgagtcaggttctggtggcgaaccttccgagtctggtagctcaggtgaatctccgggtggttctagcggttccgagtcaggtgaatctccgggtggttccagcggttctgagtcaggttcctccgaaagcggttcttctgagggcggtccaggttcctccgaaagcggttcttccgagggcggtccaggttcttctgaaagcggttcttccgagggcggtccaggtgaatctcctggtggttccagcggttccgagtcaggtgaatctccaggtggctctagcggttccgagtcaggtgaatctcctggtggttctagcggttctgaatcaggttcctccgaaagcggttcttctgagggcggtccaggttcctccgaaagcggttcttccgagggcggtccaggttcttctgaaagcggttcttccgagggcggtccaggttcctctgaaagcggttcttctgagggcggtccaggttcttccgaaagcggttcttccgagggcggtccaggttcttccgaaagcggttcttctgaaggcggtccaggttctggtggcgaaccgtccgagtctggtagctcaggtgaatctccgggtggctctagcggttccgagtcaggtgaatctcctggtggttccagcggttccgagtcaggttccggtggcgaaccgtccgaatctggtagctcaggtagcgaaggttcttctggtccaggcgaatcttcaggttcctctgaaagcggttcttctgagggcggtccaggttccggtggcgaaccgtccgaatctggtagctcaggtagcgaaggttcttctggtccaggcgaatcttcaggttcctctgaaagcggttcttctgagggcggtccaggttccggtggcgaaccttccgaatctggtagctcaggtgaatctccgggtggttctagcggttctgagtcaggttctggtggtgaaccttccgagtctggtagctcaggttctggtggcgaaccatccgagtctggtagctcaggttcttccgaaagcggttcttccgaaggcggtccaggttctggtggtgaaccgtccgaatctggtagctcaggttctggtggcgaaccatccgaatctggtagctcaggtagcgaaggttcttctggtcctggcgaatcttcaggtgaatctccaggtggctctagcggttccgaatcaggtagcgaaggttcttccggtccaggtgaatcttcaggtagcgaaggttcttctggtcctggtgaatcctcaggttccggtggcgaaccatctgaatctggtagctcaggttcctctgaaagcggttcttccgaaggtggtccaggttcctctgaaagcggttcttctgagggtggtccaggtgaatctccgggtggctccagcggttccgagtcaggttctggtggcgaaccatccgaatctggtagctcaggtagcgaaggttcttctggtcctggcgaatcttcaggtgaatctccaggtggctctagcggttccgaatcaggtagcgaaggttcttccggtcctggtgagtcttcaggtgaatctccaggtggctctagcggttccgagtcaggtagcgaaggttcttctggtcctggcgagtcctca

SEQ ID NO: 711 - protein, 768 aa, Artificial Sequence
  Description of Artificial Sequence: Synthetic polypeptide
FPTIPLSRLFDNAMLRAHRLHQLAFDTYQEFEEAYIPKEQKYSFLQNPQTSLCFSESIPTPSNREETQQKSNLELLRISLLLIQSWLEPVQFLRSVFANSLVYGASDSNVYDLLKDLEEGIQTLMGRLEDGSPRTGQIFKQTYSKFDTNSHNDDALLKNYGLLYCFRKDMDKVETFLRIVQCRSVEGSCGFGGSPAGSPTSTEEGTSESATPESGPGTSTEPSEGSAPGSPAGSPTSTEEGTSTEPSEGSAPGTSTEPSEGSAPGTSESATPESGPGSEPATSGSETPGSEPATSGSETPGSPAGSPTSTEEGTSESATPESGPGTSTEPSEGSAPGTSTEPSEGSAPGSPAGSPTSTEEGTSTEPSEGSAPGTSTEPSEGSAPGTSESATPESGPGTSTEPSEGSAPGTSESATPESGPGSEPATSGSETPGTSTEPSEGSAPGTSTEPSEGSAPGTSESATPESGPGTSESATPESGPGSPAGSPTSTEEGTSESATPESGPGSEPATSGSETPGTSESATPESGPGTSTEPSEGSAPGTSTEPSEGSAPGTSTEPSEGSAPGTSTEPSEGSAPGTSTEPSEGSAPGTSTEPSEGSAPGSPAGSPTSTEEGTSTEPSEGSAPGTSESATPESGPGSEPATSGSETPGTSESATPESGPGSEPATSGSETPGTSESATPESGPGTSTEPSEGSAPGTSESATPESGPGSPAGSPTSTEEGSPAGSPTSTEEGSPAGSPTSTEEGTSESATPESGPGTSTEPSEGSAP

SEQ ID NO: 712 - DNA, 2307 bp, Artificial Sequence
  Description of Artificial Sequence: Synthetic polynucleotide
tttccgactattccgctgtctcgtctgtttgataatgctatgctgcgtgcgcaccgtctgcaccagctggcctttgatacttaccaggaatttgaagaagcctacattcctaaagagcagaagtactctttcctgcaaaacccacagacttctctctgcttcagcgaatctattccgacgccttccaatcgcgaggaaactcagcaaaagtccaatctggaactactccgcatttctctgcttctgattcagagctggctagaaccagtgcaatttctgcgttccgtcttcgccaatagcctagtttatggcgcatccgacagcaacgtatacgatctcctgaaagatctcgaggaaggcattcagaccctgatgggtcgtctcgaggatggctctccgcgtactggtcagatcttcaagcagacttactctaaatttgatactaacagccacaatgacgatgcgcttctaaaaaactatggtctgctgtattgttttcgtaaagatatggacaaagttgaaaccttcctgcgtattgttcagtgtcgttccgttgagggcagctgtggtttctaaggtggtagcccggctggctctcctacctctactgaggaaggtacttctgaaagcgctactcctgagtctggtccaggtacctctactgaaccgtccgaaggtagcgctccaggtagcccagcaggctctccgacttccactgaggaaggtacttctactgaaccttccgaaggcagcgcaccaggtacctctactgaaccttctgagggcagcgctccaggtacttctgaaagcgctaccccggaatctggcccaggtagcgaaccggctacttctggttctgaaaccccaggtagcgaaccggctacctccggttctgaaactccaggtagcccggcaggctctccgacctctactgaggaaggtacttctgaaagcgcaaccccggagtccggcccaggtacctctaccgaaccgtctgagggcagcgcaccaggtacttctaccgaaccgtccgagggtagcgcaccaggtagcccagcaggttctcctacctccaccgaggaaggtacttctaccgaaccgtccgagggtagcgcaccaggtacctctactgaaccttctgagggcagcgctccaggtacttctgaaagcgctaccccggagtccggtccaggtacttctactgaaccgtccgaaggtagcgcaccaggtacttctgaaagcgcaacccctgaatccggtccaggtagcgaaccggctacttctggctctgagactccaggtacttctaccgaaccgtccgaaggtagcgcaccaggtacttctactgaaccgtctgaaggtagcgcaccaggtacttctgaaagcgcaaccccggaatccggcccaggtacctctgaaagcgcaaccccggagtccggcccaggtagccctgctggctctccaacctccaccgaagaaggtacctctgaaagcgcaacccctgaatccggcccaggtagcgaaccggcaacctccggttctgaaaccccaggtacctctgaaagcgctactccggagtctggcccaggtacctctactgaaccgtctgagggtagcgctccaggtacttctactgaaccgtccgaaggtagcgcaccaggtacttctaccgaaccgtccgaaggcagcgctccaggtacctctactgaaccttccgagggcagcgctccaggtacctctaccgaaccttctgaaggtagcgcaccaggtacttctaccgaaccgtccgagggtagcgcaccaggtagcccagcaggttctcctacctccaccgaggaaggtacttctaccgaaccgtccgagggtagcgcaccaggtacctctgaaagcgcaactcctgagtctggcccaggtagcgaacctgctacctccggctctgagactccaggtacctctgaaagcgcaaccccggaatctggtccaggtagcgaacctgcaacctctggctctgaaaccccaggtacctctgaaagcgctactcctgaatctggcccaggtacttctactgaaccgtccgagggcagcgcaccaggtacttctgaaagcgctactcctgagtccggcccaggtagcccggctggctctccgacttccaccgaggaaggtagcccggctggctctccaacttctactgaagaaggtagcccggcaggctctccgacctctactgaggaaggtacttctgaaagcgcaaccccggagtccggcccaggtacctctaccgaaccgtctgagggcagcgcacca

SEQ ID NO: 713 - protein, 768 aa, Artificial Sequence
  Description of Artificial Sequence: Synthetic polypeptide
FPTIPLSRLFDNAMLRAHRLHQLAFDTYQEFEEAYIPKEQKYSFLQNPQTSLCFSESIPTPSNREETQQKSNLELLRISLLLIQSWLEPVQFLRSVFANSLVYGASDSNVYDLLKDLEEGIQTLMGRLEDGSPRTGQIFKQTYSKFDTNSHNDDALLKNYGLLYCFRKDMDKVETFLRIVQCRSVEGSCGFGGSTSSTAESPGPGSTSSTAESPGPGSTSESPSGTAPGSTSSTAESPGPGSTSSTAESPGPGTSTPESGSASPGSTSESPSGTAPGTSPSGESSTAPGSTSESPSGTAPGSTSESPSGTAPGTSPSGESSTAPGSTSESPSGTAPGSTSESPSGTAPGTSPSGESSTAPGSTSESPSGTAPGSTSESPSGTAPGSTSESPSGTAPGTSTPESGSASPGSTSESPSGTAPGTSTPESGSASPGSTSSTAESPGPGSTSSTAESPGPGTSTPESGSASPGTSTPESGSASPGSTSESPSGTAPGTSTPESGSASPGTSTPESGSASPGSTSESPSGTAPGSTSESPSGTAPGSTSESPSGTAPGSTSSTAESPGPGTSTPESGSASPGTSTPESGSASPGSTSESPSGTAPGSTSESPSGTAPGTSTPESGSASPGSTSESPSGTAPGSTSESPSGTAPGTSTPESGSASPGTSPSGESSTAPGSTSSTAESPGPGTSPSGESSTAPGSTSSTAESPGPGTSTPESGSASPGSTSESPSGTAPGSTSSTAESPGPGTSTPESGSASPGTSTPESGSASP

SEQ ID NO: 714 - DNA, 2307 bp, Artificial Sequence
  Description of Artificial Sequence: Synthetic polynucleotide
tttccgactattccgctgtctcgtctgtttgataatgctatgctgcgtgcgcaccgtctgcaccagctggcctttgatacttaccaggaatttgaagaagcctacattcctaaagagcagaagtactctttcctgcaaaacccacagacttctctctgcttcagcgaatctattccgacgccttccaatcgcgaggaaactcagcaaaagtccaatctggaactactccgcatttctctgcttctgattcagagctggctagaaccagtgcaatttctgcgttccgtcttcgccaatagcctagtttatggcgcatccgacagcaacgtatacgatctcctgaaagatctcgaggaaggcattcagaccctgatgggtcgtctcgaggatggctctccgcgtactggtcagatcttcaagcagacttactctaaatttgatactaacagccacaatgacgatgcgcttctaaaaaactatggtctgctgtattgttttcgtaaagatatggacaaagttgaaaccttcctgcgtattgttcagtgtcgttccgttgagggcagctgtggtttctaaggtggttctactagctctaccgctgaatctcctggcccaggttccactagctctaccgcagaatctccgggcccaggttctactagcgaatccccttctggtaccgctccaggttctactagctctaccgctgaatctccgggtccaggttctaccagctctactgcagaatctcctggcccaggtacttctactccggaaagcggttccgcttctccaggttctaccagcgaatctccttctggcaccgctccaggtacctctcctagcggcgaatcttctaccgctccaggttctactagcgaatctccttctggcactgcaccaggttctaccagcgaatctccttctggcaccgctccaggtacctctcctagcggcgaatcttctaccgctccaggttctactagcgaatctccttctggcactgcaccaggttctaccagcgaatctccttctggcaccgctccaggtacctctcctagcggcgaatcttctaccgctccaggttctactagcgaatctccttctggcactgcaccaggttctactagcgaatctccttctggcactgcaccaggttctaccagcgaatctccgtctggcactgcaccaggtacctctacccctgaaagcggttccgcttctccaggttctactagcgaatctccttctggtaccgctccaggtacttctacccctgaaagcggctccgcttctccaggttccactagctctaccgctgaatctccgggtccaggttctactagctctactgcagaatctcctggcccaggtacctctactccggaaagcggctctgcatctccaggtacttctacccctgaaagcggttctgcatctccaggttctactagcgaatccccgtctggtaccgcaccaggtacttctaccccggaaagcggctctgcttctccaggtacttctaccccggaaagcggctccgcatctccaggttctactagcgaatctccttctggtaccgctccaggttctaccagcgaatccccgtctggtactgctccaggttctaccagcgaatctccttctggtactgcaccaggttctactagctctactgcagaatctcctggcccaggtacctctactccggaaagcggctctgcatctccaggtacttctacccctgaaagcggttctgcatctccaggttctactagcgaatctccttctggcactgcaccaggttctaccagcgaatctccgtctggcactgcaccaggtacctctacccctgaaagcggttccgcttctccaggttctactagcgaatctccttctggcactgcaccaggttctaccagcgaatctccgtctggcactgcaccaggtacctctacccctgaaagcggttccgcttctccaggtacttctccgagcggtgaatcttctaccgcaccaggttctactagctctaccgctgaatctccgggcccaggtacttctccgagcggtgaatcttctactgctccaggttccactagctctactgctgaatctcctggcccaggtacttctactccggaaagcggttccgcttctccaggttctactagcgaatctccgtctggcaccgcaccaggttctactagctctactgcagaatctcctggcccaggtacctctactccggaaagcggctctgcatctccaggtacttctacccctgaaagcggttctgcatctcca

SEQ ID NO: 715 - protein, 817 aa, Artificial Sequence
  Description of Artificial Sequence: Synthetic polypeptide
FPTIPLSRLFDNAMLRAHRLHQLAFDTYQEFEEAYIPKEQKYSFLQNPQTSLCFSESIPTPSNREETQQKSNLELLRISLLLIQSWLEPVQFLRSVFANSLVYGASDSNVYDLLKDLEEGIQTLMGRLEDGSPRTGQIFKQTYSKFDTNSHNDDALLKNYGLLYCFRKDMDKVETFLRIVQCRSVEGSCGFGMAEPAGSPTSTEEGTPGSGTASSSPGSSTPSGATGSPGASPGTSSTGSPGSPAGSPTSTEEGTSESATPESGPGTSTEPSEGSAPGSPAGSPTSTEEGTSTEPSEGSAPGTSTEPSEGSAPGTSESATPESGPGSEPATSGSETPGSEPATSGSETPGSPAGSPTSTEEGTSESATPESGPGTSTEPSEGSAPGTSTEPSEGSAPGSPAGSPTSTEEGTSTEPSEGSAPGTSTEPSEGSAPGTSESATPESGPGTSTEPSEGSAPGTSESATPESGPGSEPATSGSETPGTSTEPSEGSAPGTSTEPSEGSAPGTSESATPESGPGTSESATPESGPGSPAGSPTSTEEGTSESATPESGPGSEPATSGSETPGTSESATPESGPGTSTEPSEGSAPGTSTEPSEGSAPGTSTEPSEGSAPGTSTEPSEGSAPGTSTEPSEGSAPGTSTEPSEGSAPGSPAGSPTSTEEGTSTEPSEGSAPGTSESATPESGPGSEPATSGSETPGTSESATPESGPGSEPATSGSETPGTSESATPESGPGTSTEPSEGSAPGTSESATPESGPGSPAGSPTSTEEGSPAGSPTSTEEGSPAGSPTSTEEGTSESATPESGPGTSTEPSEGSAP

SEQ ID NO: 716 - DNA, 2454 bp, Artificial Sequence
  Description of Artificial Sequence: Synthetic polynucleotide
tttccgactattccgctgtctcgtctgtttgataatgctatgctgcgtgcgcaccgtctgcaccagctggcctttgatacttaccaggaatttgaagaagcctacattcctaaagagcagaagtactctttcctgcaaaacccacagacttctctctgcttcagcgaatctattccgacgccttccaatcgcgaggaaactcagcaaaagtccaatctggaactactccgcatttctctgcttctgattcagagctggctagaaccagtgcaatttctgcgttccgtcttcgccaatagcctagtttatggcgcatccgacagcaacgtatacgatctcctgaaagatctcgaggaaggcattcagaccctgatgggtcgtctcgaggatggctctccgcgtactggtcagatcttcaagcagacttactctaaatttgatactaacagccacaatgacgatgcgcttctaaaaaactatggtctgctgtattgttttcgtaaagatatggacaaagttgaaaccttcctgcgtattgttcagtgtcgttccgttgagggcagctgtggtttctaaggtatggctgaacctgctggctctccaacctccactgaggaaggtaccccgggtagcggtactgcttcttcctctccaggtagctctaccccttctggtgcaaccggctctccaggtgcttctccgggcaccagctctaccggttctccaggtagcccggctggctctcctacctctactgaggaaggtacttctgaaagcgctactcctgagtctggtccaggtacctctactgaaccgtccgaaggtagcgctccaggtagcccagcaggctctccgacttccactgaggaaggtacttctactgaaccttccgaaggcagcgcaccaggtacctctactgaaccttctgagggcagcgctccaggtacttctgaaagcgctaccccggaatctggcccaggtagcgaaccggctacttctggttctgaaaccccaggtagcgaaccggctacctccggttctgaaactccaggtagcccggcaggctctccgacctctactgaggaaggtacttctgaaagcgcaaccccggagtccggcccaggtacctctaccgaaccgtctgagggcagcgcaccaggtacttctaccgaaccgtccgagggtagcgcaccaggtagcccagcaggttctcctacctccaccgaggaaggtacttctaccgaaccgtccgagggtagcgcaccaggtacctctactgaaccttctgagggcagcgctccaggtacttctgaaagcgctaccccggagtccggtccaggtacttctactgaaccgtccgaaggtagcgcaccaggtacttctgaaagcgcaacccctgaatccggtccaggtagcgaaccggctacttctggctctgagactccaggtacttctaccgaaccgtccgaaggtagcgcaccaggtacttctactgaaccgtctgaaggtagcgcaccaggtacttctgaaagcgcaaccccggaatccggcccaggtacctctgaaagcgcaaccccggagtccggcccaggtagccctgctggctctccaacctccaccgaagaaggtacctctgaaagcgcaacccctgaatccggcccaggtagcgaaccggcaacctccggttctgaaaccccaggtacctctgaaagcgctactccggagtctggcccaggtacctctactgaaccgtctgagggtagcgctccaggtacttctactgaaccgtccgaaggtagcgcaccaggtacttctaccgaaccgtccgaaggcagcgctccaggtacctctactgaaccttccgagggcagcgctccaggtacctctaccgaaccttctgaaggtagcgcaccaggtacttctaccgaaccgtccgagggtagcgcaccaggtagcccagcaggttctcctacctccaccgaggaaggtacttctaccgaaccgtccgagggtagcgcaccaggtacctctgaaagcgcaactcctgagtctggcccaggtagcgaacctgctacctccggctctgagactccaggtacctctgaaagcgcaaccccggaatctggtccaggtagcgaacctgcaacctctggctctgaaaccccaggtacctctgaaagcgctactcctgaatctggcccaggtacttctactgaaccgtccgagggcagcgcaccaggtacttctgaaagcgctactcctgagtccggcccaggtagcccggctggctctccgacttccaccgaggaaggtagcccggctggctctccaacttctactgaagaaggtagcccggcaggctctccgacctctactgaggaaggtacttctgaaagcgcaaccccggagtccggcccaggtacctctaccgaaccgtctgagggcagcgcacca

SEQ ID NO: 717 - protein, 1028 aa, Artificial Sequence
  Description of Artificial Sequence: Synthetic polypeptide
FPTIPLSRLFDNAMLRAHRLHQLAFDTYQEFEEAYIPKEQKYSFLQNPQTSLCFSESIPTPSNREETQQKSNLELLRISLLLIQSWLEPVQFLRSVFANSLVYGASDSNVYDLLKDLEEGIQTLMGRLEDGSPRTGQIFKQTYSKFDTNSHNDDALLKNYGLLYCFRKDMDKVETFLRIVQCRSVEGSCGFGGSSESGSSEGGPGSSESGSSEGGPGESPGGSSGSESGSGGEPSESGSSGESPGGSSGSESGESPGGSSGSESGSSESGSSEGGPGSSESGSSEGGPGSSESGSSEGGPGESPGGSSGSESGESPGGSSGSESGESPGGSSGSESGSSESGSSEGGPGSSESGSSEGGPGSSESGSSEGGPGSSESGSSEGGPGSSESGSSEGGPGSSESGSSEGGPGSGGEPSESGSSGESPGGSSGSESGESPGGSSGSESGSGGEPSESGSSGSEGSSGPGESSGSSESGSSEGGPGSGGEPSESGSSGSEGSSGPGESSGSSESGSSEGGPGSGGEPSESGSSGESPGGSSGSESGSGGEPSESGSSGSGGEPSESGSSGSSESGSSEGGPGSGGEPSESGSSGSGGEPSESGSSGSEGSSGPGESSGESPGGSSGSESGSEGSSGPGESSGSEGSSGPGESSGSGGEPSESGSSGSSESGSSEGGPGSSESGSSEGGPGESPGGSSGSESGSGGEPSESGSSGSEGSSGPGESSGESPGGSSGSESGSEGSSGPGSSESGSSEGGPGSGGEPSESGSSGSEGSSGPGESSGSEGSSGPGESSGSEGSSGPGESSGSGGEPSESGSSGSGGEPSESGSSGESPGGSSGSESGESPGGSSGSESGSGGEPSESGSSGSEGSSGPGESSGESPGGSSGSESGSSESGSSEGGPGSSESGSSEGGPGSSESGSSEGGPGSGGEPSESGSSGSSESGSSEGGPGESPGGSSGSESGSGGEPSESGSSGSSESGSSEGGPGESPGGSSGSESGSGGEPSESGSSGESPGGSSGSESGSGGEPSESGSS

SEQ ID NO: 718 - DNA, 3087 bp, Artificial Sequence
  Description of Artificial Sequence: Synthetic polynucleotide
tttccgactattccgctgtctcgtctgtttgataatgctatgctgcgtgcgcaccgtctgcaccagctggcctttgatacttaccaggaatttgaagaagcctacattcctaaagagcagaagtactctttcctgcaaaacccacagacttctctctgcttcagcgaatctattccgacgccttccaatcgcgaggaaactcagcaaaagtccaatctggaactactccgcatttctctgcttctgattcagagctggctagaaccagtgcaatttctgcgttccgtcttcgccaatagcctagtttatggcgcatccgacagcaacgtatacgatctcctgaaagatctcgaggaaggcattcagaccctgatgggtcgtctcgaggatggctctccgcgtactggtcagatcttcaagcagacttactctaaatttgatactaacagccacaatgacgatgcgcttctaaaaaactatggtctgctgtattgttttcgtaaagatatggacaaagttgaaaccttcctgcgtattgttcagtgtcgttccgttgagggcagctgtggtttctaaggtggttcctctgaaagcggttcttccgaaggtggtccaggttcctctgaaagcggttcttctgagggtggtccaggtgaatctccgggtggctccagcggttccgagtcaggttctggtggcgaaccttccgagtctggtagctcaggtgaatctccgggtggttctagcggttccgagtcaggtgaatctccgggtggttccagcggttctgagtcaggttcctccgaaagcggttcttctgagggcggtccaggttcctccgaaagcggttcttccgagggcggtccaggttcttctgaaagcggttcttccgagggcggtccaggtgaatctcctggtggttccagcggttccgagtcaggtgaatctccaggtggctctagcggttccgagtcaggtgaatctcctggtggttctagcggttctgaatcaggttcctccgaaagcggttcttctgagggcggtccaggttcctccgaaagcggttcttccgagggcggtccaggttcttctgaaagcggttcttccgagggcggtccaggttcctctgaaagcggttcttctgagggcggtccaggttcttccgaaagcggttcttccgagggcggtccaggttcttccgaaagcggttcttctgaaggcggtccaggttctggtggcgaaccgtccgagtctggtagctcaggtgaatctccgggtggctctagcggttccgagtcaggtgaatctcctggtggttccagcggttccgagtcaggttccggtggcgaaccgtccgaatctggtagctcaggtagcgaaggttcttctggtccaggcgaatcttcaggttcctctgaaagcggttcttctgagggcggtccaggttccggtggcgaaccgtccgaatctggtagctcaggtagcgaaggttcttctggtccaggcgaatcttcaggttcctctgaaagcggttcttctgagggcggtccaggttccggtggcgaaccttccgaatctggtagctcaggtgaatctccgggtggttctagcggttctgagtcaggttctggtggtgaaccttccgagtctggtagctcaggttctggtggcgaaccatccgagtctggtagctcaggttcttccgaaagcggttcttccgaaggcggtccaggttctggtggtgaaccgtccgaatctggtagctcaggttctggtggcgaaccatccgaatctggtagctcaggtagcgaaggttcttctggtcctggcgaatcttcaggtgaatctccaggtggctctagcggttccgaatcaggtagcgaaggttcttccggtccaggtgaatcttcaggtagcgaaggttcttctggtcctggtgaatcctcaggttccggtggcgaaccatctgaatctggtagctcaggttcctctgaaagcggttcttccgaaggtggtccaggttcctctgaaagcggttcttctgagggtggtccaggtgaatctccgggtggctccagcggttccgagtcaggttctggtggcgaaccatccgaatctggtagctcaggtagcgaaggttcttctggtcctggcgaatcttcaggtgaatctccaggtggctctagcggttccgaatcaggtagcgaaggttcttccggtccaggttcctctgaaagcggttcttctgagggcggtccaggttctggtggcgaaccatctgaatctggtagctcaggtagcgaaggttcttccggtccgggtgaatcttcaggtagcgaaggttcttccggtccaggtgaatcttcaggtagcgaaggttcttctggtcctggtgaatcctcaggttccggtggcgaaccatctgaatctggtagctcaggttctggtggcgaaccatccgaatctggtagctcaggtgaatctccgggtggctccagcggttctgaatcaggtgaatctcctggtggctccagcggttctgagtcaggttctggtggcgaaccatccgaatctggtagctcaggtagcgaaggttcttctggtcctggcgaatcttcaggtgaatctccaggtggctctagcggttccgaatcaggttcctctgaaagcggttcttctgagggcggtccaggttcttccgaaagcggttcttccgagggcggtccaggttcttccgaaagcggttcttctgaaggcggtccaggttctggtggcgaaccgtccgaatctggtagctcaggttcctccgaaagcggttcttctgaaggtggtccaggtgaatctccaggtggttctagcggttctgaatcaggttctggtggcgaaccgtccgaatctggtagctcaggttcctccgaaagcggttcttctgaaggtggtccaggtgaatctccaggtggttctagcggttctgaatcaggttctggtggcgaaccgtccgaatctggtagctcaggtgaatctcctggtggttccagcggttccgagtcaggttctggtggcgaaccttccgaatctggtagctca

SEQ ID NO: 719 - protein, 1056 aa, Artificial Sequence
  Description of Artificial Sequence: Synthetic polypeptide
FPTIPLSRLFDNAMLRAHRLHQLAFDTYQEFEEAYIPKEQKYSFLQNPQTSLCFSESIPTPSNREETQQKSNLELLRISLLLIQSWLEPVQFLRSVFANSLVYGASDSNVYDLLKDLEEGIQTLMGRLEDGSPRTGQIFKQTYSKFDTNSHNDDALLKNYGLLYCFRKDMDKVETFLRIVQCRSVEGSCGFGGSPAGSPTSTEEGTSESATPESGPGTSTEPSEGSAPGSPAGSPTSTEEGTSTEPSEGSAPGTSTEPSEGSAPGTSESATPESGPGSEPATSGSETPGSEPATSGSETPGSPAGSPTSTEEGTSESATPESGPGTSTEPSEGSAPGTSTEPSEGSAPGSPAGSPTSTEEGTSTEPSEGSAPGTSTEPSEGSAPGTSESATPESGPGTSTEPSEGSAPGTSESATPESGPGSEPATSGSETPGTSTEPSEGSAPGTSTEPSEGSAPGTSESATPESGPGTSESATPESGPGSPAGSPTSTEEGTSESATPESGPGSEPATSGSETPGTSESATPESGPGTSTEPSEGSAPGTSTEPSEGSAPGTSTEPSEGSAPGTSTEPSEGSAPGTSTEPSEGSAPGTSTEPSEGSAPGSPAGSPTSTEEGTSTEPSEGSAPGTSESATPESGPGSEPATSGSETPGTSESATPESGPGSEPATSGSETPGTSESATPESGPGTSTEPSEGSAPGTSESATPESGPGSPAGSPTSTEEGSPAGSPTSTEEGSPAGSPTSTEEGTSESATPESGPGTSTEPSEGSAPGTSESATPESGPGSEPATSGSETPGTSESATPESGPGSEPATSGSETPGTSESATPESGPGTSTEPSEGSAPGSPAGSPTSTEEGTSESATPESGPGSEPATSGSETPGTSESATPESGPGSPAGSPTSTEEGSPAGSPTSTEEGTSTEPSEGSAPGTSESATPESGPGTSESATPESGPGTSESATPESGPGSEPATSGSETPGSEPATSGSETPGSPAGSPTSTEEGTSTEPSEGSAPGTSTEPSEGSAPGSEPATSGSETPGTSESATPESGPGTSTEPSEGSAP

SEQ ID NO: 720 - DNA, 3171 bp, Artificial Sequence
  Description of Artificial Sequence: Synthetic polynucleotide
tttccgactattccgctgtctcgtctgtttgataatgctatgctgcgtgcgcaccgtctgcaccagctggcctttgatacttaccaggaatttgaagaagcctacattcctaaagagcagaagtactctttcctgcaaaacccacagacttctctctgcttcagcgaatctattccgacgccttccaatcgcgaggaaactcagcaaaagtccaatctggaactactccgcatttctctgcttctgattcagagctggctagaaccagtgcaatttctgcgttccgtcttcgccaatagcctagtttatggcgcatccgacagcaacgtatacgatctcctgaaagatctcgaggaaggcattcagaccctgatgggtcgtctcgaggatggctctccgcgtactggtcagatcttcaagcagacttactctaaatttgatactaacagccacaatgacgatgcgcttctaaaaaactatggtctgctgtattgttttcgtaaagatatggacaaagttgaaaccttcctgcgtattgttcagtgtcgttccgttgagggcagctgtggtttctaaggtggtagcccggctggctctcctacctctactgaggaaggtacttctgaaagcgctactcctgagtctggtccaggtacctctactgaaccgtccgaaggtagcgctccaggtagcccagcaggctctccgacttccactgaggaaggtacttctactgaaccttccgaaggcagcgcaccaggtacctctactgaaccttctgagggcagcgctccaggtacttctgaaagcgctaccccggaatctggcccaggtagcgaaccggctacttctggttctgaaaccccaggtagcgaaccggctacctccggttctgaaactccaggtagcccggcaggctctccgacctctactgaggaaggtacttctgaaagcgcaaccccggagtccggcccaggtacctctaccgaaccgtctgagggcagcgcaccaggtacttctaccgaaccgtccgagggtagcgcaccaggtagcccagcaggttctcctacctccaccgaggaaggtacttctaccgaaccgtccgagggtagcgcaccaggtacctctactgaaccttctgagggcagcgctccaggtacttctgaaagcgctaccccggagtccggtccaggtacttctactgaaccgtccgaaggtagcgcaccaggtacttctgaaagcgcaacccctgaatccggtccaggtagcgaaccggctacttctggctctgagactccaggtacttctaccgaaccgtccgaaggtagcgcaccaggtacttctactgaaccgtctgaaggtagcgcaccaggtacttctgaaagcgcaaccccggaatccggcccaggtacctctgaaagcgcaaccccggagtccggcccaggtagccctgctggctctccaacctccaccgaagaaggtacctctgaaagcgcaacccctgaatccggcccaggtagcgaaccggcaacctccggttctgaaaccccaggtacctctgaaagcgctactccggagtctggcccaggtacctctactgaaccgtctgagggtagcgctccaggtacttctactgaaccgtccgaaggtagcgcaccaggtacttctaccgaaccgtccgaaggcagcgctccaggtacctctactgaaccttccgagggcagcgctccaggtacctctaccgaaccttctgaaggtagcgcaccaggtacttctaccgaaccgtccgagggtagcgcaccaggtagcccagcaggttctcctacctccaccgaggaaggtacttctaccgaaccgtccgagggtagcgcaccaggtacctctgaaagcgcaactcctgagtctggcccaggtagcgaacctgctacctccggctctgagactccaggtacctctgaaagcgcaaccccggaatctggtccaggtagcgaacctgcaacctctggctctgaaaccccaggtacctctgaaagcgctactcctgaatctggcccaggtacttctactgaaccgtccgagggcagcgcaccaggtacttctgaaagcgctactcctgagtccggcccaggtagcccggctggctctccgacttccaccgaggaaggtagcccggctggctctccaacttctactgaagaaggtagcccggcaggctctccgacctctactgaggaaggtacttctgaaagcgcaaccccggagtccggcccaggtacctctaccgaaccgtctgagggcagcgcaccaggtacctctgaaagcgcaactcctgagtctggcccaggtagcgaacctgctacctccggctctgagactccaggtacctctgaaagcgcaaccccggaatctggtccaggtagcgaacctgcaacctctggctctgaaaccccaggtacctctgaaagcgctactcctgaatctggcccaggtacttctactgaaccgtccgagggcagcgcaccaggtagccctgctggctctccaacctccaccgaagaaggtacctctgaaagcgcaacccctgaatccggcccaggtagcgaaccggcaacctccggttctgaaaccccaggtacttctgaaagcgctactcctgagtccggcccaggtagcccggctggctctccgacttccaccgaggaaggtagcccggctggctctccaacttctactgaagaaggtacttctaccgaaccttccgagggcagcgcaccaggtacttctgaaagcgctacccctgagtccggcccaggtacttctgaaagcgctactcctgaatccggtccaggtacttctgaaagcgctaccccggaatctggcccaggtagcgaaccggctacttctggttctgaaaccccaggtagcgaaccggctacctccggttctgaaactccaggtagcccagcaggctctccgacttccactgaggaaggtacttctactgaaccttccgaaggcagcgcaccaggtacctctactgaaccttctgagggcagcgctccaggtagcgaacctgcaacctctggctctgaaaccccaggtacctctgaaagcgctactcctgaatctggcccaggtacttctactgaaccgtccgagggcagcgcacca

SEQ ID NO: 721 - protein, 1067 aa, Artificial Sequence
  Description of Artificial Sequence: Synthetic polypeptide
  MOD_RES (622)..(624): Any amino acid
  MOD_RES (635)..(638): Any amino acid
FPTIPLSRLFDNAMLRAHRLHQLAFDTYQEFEEAYIPKEQKYSFLQNPQTSLCFSESIPTPSNREETQQKSNLELLRISLLLIQSWLEPVQFLRSVFANSLVYGASDSNVYDLLKDLEEGIQTLMGRLEDGSPRTGQIFKQTYSKFDTNSHNDDALLKNYGLLYCFRKDMDKVETFLRIVQCRSVEGSCGFGGSTSESPSGTAPGTSPSGESSTAPGSTSESPSGTAPGSTSESPSGTAPGTSTPESGSASPGTSTPESGSASPGSTSESPSGTAPGSTSESPSGTAPGTSPSGESSTAPGSTSESPSGTAPGTSPSGESSTAPGTSPSGESSTAPGSTSSTAESPGPGTSPSGESSTAPGTSPSGESSTAPGSTSSTAESPGPGTSTPESGSASPGTSTPESGSASPGSTSESPSGTAPGSTSESPSGTAPGTSTPESGSASPGSTSSTAESPGPGTSTPESGSASPGSTSESPSGTAPGTSPSGESSTAPGSTSSTAESPGPGTSPSGESSTAPGTSTPESGSASPGSTSSTAESPGPGSTSSTAESPGPGSTSSTAESPGPGSTSSTAESPGPGTSPSGESSTAPGSTSESPSGTAPGSTSESPSGTAPGTSTPESGPXXXGASASGAPSTXXXXSESPSGTAPGSTSESPSGTAPGSTSESPSGTAPGSTSESPSGTAPGSTSESPSGTAPGSTSESPSGTAPGTSTPESGSASPGTSPSGESSTAPGTSPSGESSTAPGSTSSTAESPGPGTSPSGESSTAPGTSTPESGSASPGSTSESPSGTAPGSTSESPSGTAPGTSPSGESSTAPGSTSESPSGTAPGTSTPESGSASPGTSTPESGSASPGSTSESPSGTAPGTSTPESGSASPGSTSSTAESPGPGSTSESPSGTAPGSTSESPSGTAPGTSPSGESSTAPGSTSSTAESPGPGTSPSGESSTAPGTSTPESGSASPGTSPSGESSTAPGTSPSGESSTAPGTSPSGESSTAPGSTSSTAESPGPGSTSSTAESPGPGTSPSGESSTAPGSSPSASTGTGPGSSTPSGATGSPGSSTPSGATGSP

SEQ ID NO: 722 - DNA, 3204 bp, Artificial Sequence
  Description of Artificial Sequence: Synthetic polynucleotide
  modified_base (1866)..(1877): a, c, t, g, unknown or other
  modified_base (1909)..(1916): a, c, t, g, unknown or other
tttccgactattccgctgtctcgtctgtttgataatgctatgctgcgtgcgcaccgtctgcaccagctggcctttgatacttaccaggaatttgaagaagcctacattcctaaagagcagaagtactctttcctgcaaaacccacagacttctctctgcttcagcgaatctattccgacgccttccaatcgcgaggaaactcagcaaaagtccaatctggaactactccgcatttctctgcttctgattcagagctggctagaaccagtgcaatttctgcgttccgtcttcgccaatagcctagtttatggcgcatccgacagcaacgtatacgatctcctgaaagatctcgaggaaggcattcagaccctgatgggtcgtctcgaggatggctctccgcgtactggtcagatcttcaagcagacttactctaaatttgatactaacagccacaatgacgatgcgcttctaaaaaactatggtctgctgtattgttttcgtaaagatatggacaaagttgaaaccttcctgcgtattgttcagtgtcgttccgttgagggcagctgtggtttctaaggtggttctaccagcgaatctccttctggcaccgctccaggtacctctcctagcggcgaatcttctaccgctccaggttctactagcgaatctccttctggcactgcaccaggttctactagcgaatccccgtctggtactgctccaggtacttctactcctgaaagcggttccgcttctccaggtacctctactccggaaagcggttctgcatctccaggttctaccagcgaatctccttctggcaccgctccaggttctactagcgaatccccgtctggtaccgcaccaggtacttctcctagcggcgaatcttctaccgcaccaggttctactagcgaatctccgtctggcactgctccaggtacttctcctagcggtgaatcttctaccgctccaggtacttcccctagcggcgaatcttctaccgctccaggttctactagctctactgcagaatctccgggcccaggtacctctcctagcggtgaatcttctaccgctccaggtacttctccgagcggtgaatcttctaccgctccaggttctactagctctactgcagaatctcctggcccaggtacctctactccggaaagcggctctgcatctccaggtacttctacccctgaaagcggttctgcatctccaggttctactagcgaatctccttctggcactgcaccaggttctaccagcgaatctccgtctggcactgcaccaggtacctctacccctgaaagcggttccgcttctccaggttctaccagctctaccgcagaatctcctggtccaggtacctctactccggaaagcggctctgcatctccaggttctactagcgaatctccttctggcactgcaccaggtacttctccgagcggtgaatcttctaccgcaccaggttctactagctctaccgctgaatctccgggcccaggtacttctccgagcggtgaatcttctactgctccaggtacctctactcctgaaagcggttctgcatctccaggttccactagctctaccgcagaatctccgggcccaggttctactagctctactgctgaatctcctggcccaggttctactagctctactgctgaatctccgggtccaggttctaccagctctactgctgaatctcctggtccaggtacctccccgagcggtgaatcttctactgcaccaggttctactagcgaatctccttctggcactgcaccaggttctaccagcgaatctccgtctggcactgcaccaggtacctctacccctgaaagcggtccnnnnnnnnnnnntgcaagcgcaagcggcgcgccaagcacgggannnnnnnntagcgaatctccttctggtaccgctccaggttctaccagcgaatccccgtctggtactgctccaggttctaccagcgaatctccttctggtactgcaccaggttctactagcgaatctccttctggtaccgctccaggttctaccagcgaatccccgtctggtactgctccaggttctaccagcgaatctccttctggtactgcaccaggtacttctactccggaaagcggttccgcatctccaggtacttctcctagcggtgaatcttctactgctccaggtacctctcctagcggcgaatcttctactgctccaggttctaccagctctactgctgaatctccgggtccaggtacttccccgagcggtgaatcttctactgcaccaggtacttctactccggaaagcggttccgcttctccaggttctaccagcgaatctccttctggcaccgctccaggttctactagcgaatccccgtctggtaccgcaccaggtacttctcctagcggcgaatcttctaccgcaccaggttctactagcgaatccccgtctggtaccgcaccaggtacttctaccccggaaagcggctctgcttctccaggtacttctaccccggaaagcggctccgcatctccaggttctactagcgaatctccttctggtaccgctccaggtacttctacccctgaaagcggctccgcttctccaggttccactagctctaccgctgaatctccgggtccaggttctaccagcgaatctccttctggcaccgctccaggttctactagcgaatccccgtctggtaccgcaccaggtacttctcctagcggcgaatcttctaccgcaccaggttctaccagctctactgctgaatctccgggtccaggtacttccccgagcggtgaatcttctactgcaccaggtacttctactccggaaagcggttccgcttctccaggtacctcccctagcggcgaatcttctactgctccaggtacctctcctagcggcgaatcttctaccgctccaggtacctcccctagcggtgaatcttctaccgcaccaggttctactagctctactgctgaatctccgggtccaggttctaccagctctactgctgaatctcctggtccaggtacctccccgagcggtgaatcttctactgcaccaggttctagcccttctgcttccaccggtaccggcccaggtagctctactccgtctggtgcaactggctctccaggtagctctactccgtctggtgcaaccggctcccca

SEQ ID NO: 723 - protein, 1056 aa, Artificial Sequence
  Description of Artificial Sequence: Synthetic polypeptide
FPTIPLSRLFDNAMLRAHRLHQLAFDTYQEFEEAYIPKEQKYSFLQNPQTSLCFSESIPTPSNREETQQKSNLELLRISLLLIQSWLEPVQFLRSVFANSLVYGASDSNVYDLLKDLEEGIQTLMGRLEDGSPRTGQIFKQTYSKFDTNSHNDDALLKNYGLLYCFRKDMDKVETFLRIVQCRSVEGSCGFGGASPGTSSTGSPGSSPSASTGTGPGSSPSASTGTGPGTPGSGTASSSPGSSTPSGATGSPGSNPSASTGTGPGASPGTSSTGSPGTPGSGTASSSPGSSTPSGATGSPGTPGSGTASSSPGASPGTSSTGSPGASPGTSSTGSPGTPGSGTASSSPGSSTPSGATGSPGASPGTSSTGSPGTPGSGTASSSPGSSTPSGATGSPGSNPSASTGTGPGSSPSASTGTGPGSSTPSGATGSPGSSTPSGATGSPGASPGTSSTGSPGASPGTSSTGSPGASPGTSSTGSPGTPGSGTASSSPGASPGTSSTGSPGASPGTSSTGSPGASPGTSSTGSPGSSPSASTGTGPGTPGSGTASSSPGASPGTSSTGSPGASPGTSSTGSPGASPGTSSTGSPGSSTPSGATGSPGSSTPSGATGSPGASPGTSSTGSPGTPGSGTASSSPGSSTPSGATGSPGSSTPSGATGSPGSSTPSGATGSPGSSPSASTGTGPGASPGTSSTGSPGASPGTSSTGSPGTPGSGTASSSPGASPGTSSTGSPGASPGTSSTGSPGASPGTSSTGSPGASPGTSSTGSPGTPGSGTASSSPGSSTPSGATGSPGTPGSGTASSSPGSSTPSGATGSPGTPGSGTASSSPGSSTPSGATGSPGSSTPSGATGSPGSSPSASTGTGPGSSPSASTGTGPGASPGTSSTGSPGTPGSGTASSSPGSSTPSGATGSPGSSPSASTGTGPGSSPSASTGTGPGASPGTSSTGSPGASPGTSSTGSPGSSTPSGATGSPGSSPSASTGTGPGASPGTSSTGSPGSSPSASTGTGPGTPGSGTASSSPGSSTPSGATGSPGSSTPSGATGSPGASPGTSSTGSP

SEQ ID NO: 724 - DNA, 3171 bp, Artificial Sequence
  Description of Artificial Sequence: Synthetic polynucleotide
tttccgactattccgctgtctcgtctgtttgataatgctatgctgcgtgcgcaccgtctgcaccagctggcctttgatacttaccaggaatttgaagaagcctacattcctaaagagcagaagtactctttcctgcaaaacccacagacttctctctgcttcagcgaatctattccgacgccttccaatcgcgaggaaactcagcaaaagtccaatctggaactactccgcatttctctgcttctgattcagagctggctagaaccagtgcaatttctgcgttccgtcttcgccaatagcctagtttatggcgcatccgacagcaacgtatacgatctcctgaaagatctcgaggaaggcattcagaccctgatgggtcgtctcgaggatggctctccgcgtactggtcagatcttcaagcagacttactctaaatttgatactaacagccacaatgacgatgcgcttctaaaaaactatggtctgctgtattgttttcgtaaagatatggacaaagttgaaaccttcctgcgtattgttcagtgtcgttccgttgagggcagctgtggtttctaaggtggtgcttccccgggcaccagctctactggttctccaggttctagcccgtctgcttctactggtactggtccaggttctagcccttctgcttccactggtactggtccaggtaccccgggtagcggtaccgcttcttcttctccaggtagctctactccgtctggtgctaccggctctccaggttctaacccttctgcatccaccggtaccggcccaggtgcttctccgggcaccagctctactggttctccaggtaccccgggcagcggtaccgcatcttcttctccaggtagctctactccttctggtgcaactggttctccaggtactcctggcagcggtaccgcttcttcttctccaggtgcttctcctggtactagctctactggttctccaggtgcttctccgggcactagctctactggttctccaggtaccccgggtagcggtactgcttcttcctctccaggtagctctaccccttctggtgcaaccggctctccaggtgcttctccgggcaccagctctaccggttctccaggtaccccgggtagcggtaccgcttcttcttctccaggtagctctactccgtctggtgctaccggctctccaggttctaacccttctgcatccaccggtaccggcccaggttctagcccttctgcttccaccggtactggcccaggtagctctaccccttctggtgctaccggctccccaggtagctctactccttctggtgcaactggctctccaggtgcatctccgggcactagctctactggttctccaggtgcatcccctggcactagctctactggttctccaggtgcttctcctggtaccagctctactggttctccaggtactcctggcagcggtaccgcttcttcttctccaggtgcttctcctggtactagctctactggttctccaggtgcttctccgggcactagctctactggttctccaggtgcttccccgggcactagctctaccggttctccaggttctagcccttctgcatctactggtactggcccaggtactccgggcagcggtactgcttcttcctctccaggtgcatctccgggcactagctctactggttctccaggtgcatcccctggcactagctctactggttctccaggtgcttctcctggtaccagctctactggttctccaggtagctctactccgtctggtgcaaccggttccccaggtagctctactccttctggtgctactggctccccaggtgcatcccctggcaccagctctaccggttctccaggtaccccgggcagcggtaccgcatcttcctctccaggtagctctaccccgtctggtgctaccggttccccaggtagctctaccccgtctggtgcaaccggctccccaggtagctctactccgtctggtgcaaccggctccccaggttctagcccgtctgcttccactggtactggcccaggtgcttccccgggcaccagctctactggttctccaggtgcatccccgggtaccagctctaccggttctccaggtactcctggcagcggtactgcatcttcctctccaggtgcttctccgggcaccagctctactggttctccaggtgcatctccgggcactagctctactggttctccaggtgcatcccctggcactagctctactggttctccaggtgcttctcctggtaccagctctactggttctccaggtacccctggtagcggtactgcttcttcctctccaggtagctctactccgtctggtgctaccggttctccaggtaccccgggtagcggtaccgcatcttcttctccaggtagctctaccccgtctggtgctactggttctccaggtactccgggcagcggtactgcttcttcctctccaggtagctctaccccttctggtgctactggctctccaggtagctctaccccgtctggtgctactggctccccaggttctagcccttctgcatccaccggtaccggtccaggttctagcccgtctgcatctactggtactggtccaggtgcatccccgggcactagctctaccggttctccaggtactcctggtagcggtactgcttcttcttctccaggtagctctactccttctggtgctactggttctccaggttctagcccttctgcatccaccggtaccggcccaggttctagcccgtctgcttctaccggtactggtccaggtgcttctccgggtactagctctactggttctccaggtgcatctcctggtactagctctactggttctccaggtagctctactccgtctggtgcaaccggctctccaggttctagcccttctgcatctaccggtactggtccaggtgcatcccctggtaccagctctaccggttctccaggttctagcccttctgcttctaccggtaccggtccaggtacccctggcagcggtaccgcatcttcctctccaggtagctctactccgtctggtgcaaccggttccccaggtagctctactccttctggtgctactggctccccaggtgcatcccctggcaccagctctaccggttctcca

SEQ ID NO: 725 - protein, 1067 aa, Artificial Sequence
  Description of Artificial Sequence: Synthetic polypeptide
FPTIPLSRLFDNAMLRAHRLHQLAFDTYQEFEEAYIPKEQKYSFLQNPQTSLCFSESIPTPSNREETQQKSNLELLRISLLLIQSWLEPVQFLRSVFANSLVYGASDSNVYDLLKDLEEGIQTLMGRLEDGSPRTGQIFKQTYSKFDTNSHNDDALLKNYGLLYCFRKDMDKVETFLRIVQCRSVEGSCGFGGTSTEPSEGSAPGSEPATSGSETPGSPAGSPTSTEEGSTSSTAESPGPGTSTPESGSASPGSTSESPSGTAPGSTSESPSGTAPGTSTPESGSASPGTSTPESGSASPGSEPATSGSETPGTSESATPESGPGSPAGSPTSTEEGTSTEPSEGSAPGTSESATPESGPGTSTEPSEGSAPGTSTEPSEGSAPGSPAGSPTSTEEGTSTEPSEGSAPGTSTEPSEGSAPGTSESATPESGPGTSESATPESGPGTSTEPSEGSAPGTSTEPSEGSAPGTSESATPESGPGTSTEPSEGSAPGSEPATSGSETPGSPAGSPTSTEEGSSTPSGATGSPGTPGSGTASSSPGSSTPSGATGSPGTSTEPSEGSAPGTSTEPSEGSAPGSEPATSGSETPGSPAGSPTSTEEGSPAGSPTSTEEGTSTEPSEGSAPGASASGAPSTGGTSESATPESGPGSPAGSPTSTEEGSPAGSPTSTEEGSTSSTAESPGPGSTSESPSGTAPGTSPSGESSTAPGTPGSGTASSSPGSSTPSGATGSPGSSPSASTGTGPGSEPATSGSETPGTSESATPESGPGSEPATSGSETPGSTSSTAESPGPGSTSSTAESPGPGTSPSGESSTAPGSEPATSGSETPGSEPATSGSETPGTSTEPSEGSAPGSTSSTAESPGPGTSTPESGSASPGSTSESPSGTAPGTSTEPSEGSAPGTSTEPSEGSAPGTSTEPSEGSAPGSSTPSGATGSPGSSPSASTGTGPGASPGTSSTGSPGSEPATSGSETPGTSESATPESGPGSPAGSPTSTEEGSSTPSGATGSPGSSPSASTGTGPGASPGTSSTGSPGTSESATPESGPGTSTEPSEGSAPGTSTEPSEGSAP

SEQ ID NO: 726 - DNA, 3204 bp, Artificial Sequence
  Description of Artificial Sequence: Synthetic polynucleotide
tttccgactattccgctgtctcgtctgtttgataatgctatgctgcgtgcgcaccgtctgcaccagctggcctttgatacttaccaggaatttgaagaagcctacattcctaaagagcagaagtactctttcctgcaaaacccacagacttctctctgcttcagcgaatctattccgacgccttccaatcgcgaggaaactcagcaaaagtccaatctggaactactccgcatttctctgcttctgattcagagctggctagaaccagtgcaatttctgcgttccgtcttcgccaatagcctagtttatggcgcatccgacagcaacgtatacgatctcctgaaagatctcgaggaaggcattcagaccctgatgggtcgtctcgaggatggctctccgcgtactggtcagatcttcaagcagacttactctaaatttgatactaacagccacaatgacgatgcgcttctaaaaaactatggtctgctgtattgttttcgtaaagatatggacaaagttgaaaccttcctgcgtattgttcagtgtcgttccgttgagggcagctgtggtttctaaggtggtacttctactgaaccgtctgaaggcagcgcaccaggtagcgaaccggctacttccggttctgaaaccccaggtagcccagcaggttctccaacttctactgaagaaggttctaccagctctaccgcagaatctcctggtccaggtacctctactccggaaagcggctctgcatctccaggttctactagcgaatctccttctggcactgcaccaggttctactagcgaatccccgtctggtactgctccaggtacttctactcctgaaagcggttccgcttctccaggtacctctactccggaaagcggttctgcatctccaggtagcgaaccggcaacctccggctctgaaaccccaggtacctctgaaagcgctactcctgaatccggcccaggtagcccggcaggttctccgacttccactgaggaaggtacctctactgaaccttctgagggcagcgctccaggtacttctgaaagcgctaccccggagtccggtccaggtacttctactgaaccgtccgaaggtagcgcaccaggtacttctaccgaaccgtccgagggtagcgcaccaggtagcccagcaggttctcctacctccaccgaggaaggtacttctaccgaaccgtccgagggtagcgcaccaggtacttctaccgaaccttccgagggcagcgcaccaggtacttctgaaagcgctacccctgagtccggcccaggtacttctgaaagcgctactcctgaatccggtccaggtacctctactgaaccttccgaaggcagcgctccaggtacctctaccgaaccgtccgagggcagcgcaccaggtacttctgaaagcgcaacccctgaatccggtccaggtacttctactgaaccttccgaaggtagcgctccaggtagcgaacctgctacttctggttctgaaaccccaggtagcccggctggctctccgacctccaccgaggaaggtagctctaccccgtctggtgctactggttctccaggtactccgggcagcggtactgcttcttcctctccaggtagctctaccccttctggtgctactggctctccaggtacctctaccgaaccgtccgagggtagcgcaccaggtacctctactgaaccgtctgagggtagcgctccaggtagcgaaccggcaacctccggttctgaaactccaggtagccctgctggctctccgacttctactgaggaaggtagcccggctggttctccgacttctactgaggaaggtacttctaccgaaccttccgaaggtagcgctccaggtgcaagcgcaagcggcgcgccaagcacgggaggtacttctgaaagcgctactcctgagtccggcccaggtagcccggctggctctccgacttccaccgaggaaggtagcccggctggctctccaacttctactgaagaaggttctaccagctctaccgctgaatctcctggcccaggttctactagcgaatctccgtctggcaccgcaccaggtacttcccctagcggtgaatcttctactgcaccaggtacccctggcagcggtaccgcttcttcctctccaggtagctctaccccgtctggtgctactggctctccaggttctagcccgtctgcatctaccggtaccggcccaggtagcgaaccggcaacctccggctctgaaactccaggtacttctgaaagcgctactccggaatccggcccaggtagcgaaccggctacttccggctctgaaaccccaggttccaccagctctactgcagaatctccgggcccaggttctactagctctactgcagaatctccgggtccaggtacttctcctagcggcgaatcttctaccgctccaggtagcgaaccggcaacctctggctctgaaactccaggtagcgaacctgcaacctccggctctgaaaccccaggtacttctactgaaccttctgagggcagcgcaccaggttctaccagctctaccgcagaatctcctggtccaggtacctctactccggaaagcggctctgcatctccaggttctactagcgaatctccttctggcactgcaccaggtacttctaccgaaccgtccgaaggcagcgctccaggtacctctactgaaccttccgagggcagcgctccaggtacctctaccgaaccttctgaaggtagcgcaccaggtagctctactccgtctggtgcaaccggctccccaggttctagcccgtctgcttccactggtactggcccaggtgcttccccgggcaccagctctactggttctccaggtagcgaacctgctacctccggttctgaaaccccaggtacctctgaaagcgcaactccggagtctggtccaggtagccctgcaggttctcctacctccactgaggaaggtagctctactccgtctggtgcaaccggctccccaggttctagcccgtctgcttccactggtactggcccaggtgcttccccgggcaccagctctactggttctccaggtacctctgaaagcgctactccggagtctggcccaggtacctctactgaaccgtctgagggtagcgctccaggtacttctactgaaccgtccgaaggtagcgcacca

SEQ ID NO: 727 - protein, 1510 aa, Artificial Sequence
  Description of Artificial Sequence: Synthetic polypeptide
FPTIPLSRLFDNAMLRAHRLHQLAFDTYQEFEEAYIPKEQKYSFLQNPQTSLCFSESIPTPSNREETQQKSNLELLRISLLLIQSWLEPVQFLRSVFANSLVYGASDSNVYDLLKDLEEGIQTLMGRLEDGSPRTGQIFKQTYSKFDTNSHNDDALLKNYGLLYCFRKDMDKVETFLRIVQCRSVEGSCGFGGTSTEPSEGSAPGSEPATSGSETPGSPAGSPTSTEEGSTSSTAESPGPGTSTPESGSASPGSTSESPSGTAPGSTSESPSGTAPGTSTPESGSASPGTSTPESGSASPGSEPATSGSETPGTSESATPESGPGSPAGSPTSTEEGTSTEPSEGSAPGTSESATPESGPGTSTEPSEGSAPGTSTEPSEGSAPGSPAGSPTSTEEGTSTEPSEGSAPGTSTEPSEGSAPGTSESATPESGPGTSESATPESGPGTSTEPSEGSAPGTSTEPSEGSAPGTSESATPESGPGTSTEPSEGSAPGSEPATSGSETPGSPAGSPTSTEEGSSTPSGATGSPGTPGSGTASSSPGSSTPSGATGSPGTSTEPSEGSAPGTSTEPSEGSAPGSEPATSGSETPGSPAGSPTSTEEGSPAGSPTSTEEGTSTEPSEGSAPGPEPTGPAPSGGSEPATSGSETPGTSESATPESGPGSPAGSPTSTEEGTSESATPESGPGSPAGSPTSTEEGSPAGSPTSTEEGTSESATPESGPGSPAGSPTSTEEGSPAGSPTSTEEGSTSSTAESPGPGSTSESPSGTAPGTSPSGESSTAPGSTSESPSGTAPGSTSESPSGTAPGTSPSGESSTAPGTSTEPSEGSAPGTSESATPESGPGTSESATPESGPGSEPATSGSETPGTSESATPESGPGTSESATPESGPGTSTEPSEGSAPGTSESATPESGPGTSTEPSEGSAPGTSPSGESSTAPGTSPSGESSTAPGTSPSGESSTAPGTSTEPSEGSAPGSPAGSPTSTEEGTSTEPSEGSAPGSSPSASTGTGPGSSTPSGATGSPGSSTPSGATGSPGSSTPSGATGSPGSSTPSGATGSPGASPGTSSTGSPGASASGAPSTGGTSPSGESSTAPGSTSSTAESPGPGTSPSGESSTAPGTSESATPESGPGTSTEPSEGSAPGTSTEPSEGSAPGSSPSASTGTGPGSSTPSGATGSPGASPGTSSTGSPGTSTPESGSASPGTSPSGESSTAPGTSPSGESSTAPGTSESATPESGPGSEPATSGSETPGTSTEPSEGSAPGSTSESPSGTAPGSTSESPSGTAPGTSTPESGSASPGSPAGSPTSTEEGTSESATPESGPGTSTEPSEGSAPGSPAGSPTSTEEGTSESATPESGPGSEPATSGSETPGSSTPSGATGSPGASPGTSSTGSPGSSTPSGATGSPGSTSESPSGTAPGTSPSGESSTAPGSTSSTAESPGPGSSTPSGATGSPGASPGTSSTGSPGTPGSGTASSSPGSPAGSPTSTEEGSPAGSPTSTEEGTSTEPSEGSAP

SEQ ID NO: 728 - DNA, 4533 bp, Artificial Sequence
  Description of Artificial Sequence: Synthetic polynucleotide
tttccgactattccgctgtctcgtctgtttgataatgctatgctgcgtgcgcaccgtctgcaccagctggcctttgatacttaccaggaatttgaagaagcctacattcctaaagagcagaagtactctttcctgcaaaacccacagacttctctctgcttcagcgaatctattccgacgccttccaatcgcgaggaaactcagcaaaagtccaatctggaactactccgcatttctctgcttctgattcagagctggctagaaccagtgcaatttctgcgttccgtcttcgccaatagcctagtttatggcgcatccgacagcaacgtatacgatctcctgaaagatctcgaggaaggcattcagaccctgatgggtcgtctcgaggatggctctccgcgtactggtcagatcttcaagcagacttactctaaatttgatactaacagccacaatgacgatgcgcttctaaaaaactatggtctgctgtattgttttcgtaaagatatggacaaagttgaaaccttcctgcgtattgttcagtgtcgttccgttgagggcagctgtggtttctaaggtggtacttctactgaaccgtctgaaggcagcgcaccaggtagcgaaccggctacttccggttctgaaaccccaggtagcccagcaggttctccaacttctactgaagaaggttctaccagctctaccgcagaatctcctggtccaggtacctctactccggaaagcggctctgcatctccaggttctactagcgaatctccttctggcactgcaccaggttctactagcgaatccccgtctggtactgctccaggtacttctactcctgaaagcggttccgcttctccaggtacctctactccggaaagcggttctgcatctccaggtagcgaaccggcaacctccggctctgaaaccccaggtacctctgaaagcgctactcctgaatccggcccaggtagcccggcaggttctccgacttccactgaggaaggtacctctactgaaccttctgagggcagcgctccaggtacttctgaaagcgctaccccggagtccggtccaggtacttctactgaaccgtccgaaggtagcgcaccaggtacttctaccgaaccgtccgagggtagcgcaccaggtagcccagcaggttctcctacctccaccgaggaaggtacttctaccgaaccgtccgagggtagcgcaccaggtacttctaccgaaccttccgagggcagcgcaccaggtacttctgaaagcgctacccctgagtccggcccaggtacttctgaaagcgctactcctgaatccggtccaggtacctctactgaaccttccgaaggcagcgctccaggtacctctaccgaaccgtccgagggcagcgcaccaggtacttctgaaagcgcaacccctgaatccggtccaggtacttctactgaaccttccgaaggtagcgctccaggtagcgaacctgctacttctggttctgaaaccccaggtagcccggctggctctccgacctccaccgaggaaggtagctctaccccgtctggtgctactggttctccaggtactccgggcagcggtactgcttcttcctctccaggtagctctaccccttctggtgctactggctctccaggtacctctaccgaaccgtccgagggtagcgcaccaggtacctctactgaaccgtctgagggtagcgctccaggtagcgaaccggcaacctccggttctgaaactccaggtagccctgctggctctccgacttctactgaggaaggtagcccggctggttctccgacttctactgaggaaggtacttctaccgaaccttccgaaggtagcgctccaggtccagaaccaacggggccggccccaagcggaggtagcgaaccggcaacctccggctctgaaaccccaggtacctctgaaagcgctactcctgaatccggcccaggtagcccggcaggttctccgacttccactgaggaaggtacttctgaaagcgctactcctgagtccggcccaggtagcccggctggctctccgacttccaccgaggaaggtagcccggctggctctccaacttctactgaagaaggtacttctgaaagcgctactcctgagtccggcccaggtagcccggctggctctccgacttccaccgaggaaggtagcccggctggctctccaacttctactgaagaaggttctaccagctctaccgctgaatctcctggcccaggttctactagcgaatctccgtctggcaccgcaccaggtacttcccctagcggtgaatcttctactgcaccaggttctaccagcgaatctccttctggcaccgctccaggttctactagcgaatccccgtctggtaccgcaccaggtacttctcctagcggcgaatcttctaccgcaccaggtacttctaccgaaccttccgagggcagcgcaccaggtacttctgaaagcgctacccctgagtccggcccaggtacttctgaaagcgctactcctgaatccggtccaggtagcgaaccggcaacctctggctctgaaaccccaggtacctctgaaagcgctactccggaatctggtccaggtacttctgaaagcgctactccggaatccggtccaggtacctctactgaaccttctgagggcagcgctccaggtacttctgaaagcgctaccccggagtccggtccaggtacttctactgaaccgtccgaaggtagcgcaccaggtacctcccctagcggcgaatcttctactgctccaggtacctctcctagcggcgaatcttctaccgctccaggtacctcccctagcggtgaatcttctaccgcaccaggtacttctaccgaaccgtccgagggtagcgcaccaggtagcccagcaggttctcctacctccaccgaggaaggtacttctaccgaaccgtccgagggtagcgcaccaggttctagcccttctgcttccaccggtaccggcccaggtagctctactccgtctggtgcaactggctctccaggtagctctactccgtctggtgcaaccggctccccaggtagctctaccccgtctggtgctaccggctctccaggtagctctaccccgtctggtgcaaccggctccccaggtgcatccccgggtactagctctaccggttctccaggtgcaagcgcaagcggcgcgccaagcacgggaggtacttctccgagcggtgaatcttctaccgcaccaggttctactagctctaccgctgaatctccgggcccaggtacttctccgagcggtgaatcttctactgctccaggtacctctgaaagcgctactccggagtctggcccaggtacctctactgaaccgtctgagggtagcgctccaggtacttctactgaaccgtccgaaggtagcgcaccaggttctagcccttctgcatctactggtactggcccaggtagctctactccttctggtgctaccggctctccaggtgcttctccgggtactagctctaccggttctccaggtacttctactccggaaagcggttccgcatctccaggtacttctcctagcggtgaatcttctactgctccaggtacctctcctagcggcgaatcttctactgctccaggtacttctgaaagcgcaacccctgaatccggtccaggtagcgaaccggctacttctggctctgagactccaggtacttctaccgaaccgtccgaaggtagcgcaccaggttctaccagcgaatccccttctggtactgctccaggttctaccagcgaatccccttctggcaccgcaccaggtacttctacccctgaaagcggctccgcttctccaggtagcccggcaggctctccgacctctactgaggaaggtacttctgaaagcgcaaccccggagtccggcccaggtacctctaccgaaccgtctgagggcagcgcaccaggtagccctgctggctctccaacctccaccgaagaaggtacctctgaaagcgcaacccctgaatccggcccaggtagcgaaccggcaacctccggttctgaaaccccaggtagctctaccccgtctggtgctaccggttccccaggtgcttctcctggtactagctctaccggttctccaggtagctctaccccgtctggtgctactggctctccaggttctactagcgaatccccgtctggtactgctccaggtacttcccctagcggtgaatcttctactgctccaggttctaccagctctaccgcagaatctccgggtccaggtagctctaccccttctggtgcaaccggctctccaggtgcatccccgggtaccagctctaccggttctccaggtactccgggtagcggtaccgcttcttcctctccaggtagccctgctggctctccgacttctactgaggaaggtagcccggctggttctccgacttctactgaggaaggtacttctaccgaaccttccgaaggtagcgctcca

SEQ ID NO: 729 - protein, 386 aa, Artificial Sequence
  Description of Artificial Sequence: Synthetic polypeptide
MAEPAGSPTSTEEGTPGSGTASSSPGSSTPSGATGSPGASPGTSSTGSPGFPTIPLSRLFDNAMLRAHRLHQLAFDTYQEFEEAYIPKEQKYSFLQNPQTSLCFSESIPTPSNREETQQKSNLELLRISLLLIQSWLEPVQFLRSVFANSLVYGASDSNVYDLLKDLEEGIQTLMGRLEDGSPRTGQIFKQTYSKFDTNSHNDDALLKNYGLLYCFRKDMDKVETFLRIVQCRSVEGSCGFGGSEPATSGSETPGTSESATPESGPGSEPATSGSETPGSPAGSPTSTEEGTSTEPSEGSAPGSEPATSGSETPGSEPATSGSETPGSEPATSGSETPGTSTEPSEGSAPGTSESATPESGPGSEPATSGSETPGTSTEPSEGSAP

SEQ ID NO: 730 - DNA, 1161 bp, Artificial Sequence
  Description of Artificial Sequence: Synthetic polynucleotide
atggctgaacctgctggctctccaacctccactgaggaaggtaccccgggtagcggtactgcttcttcctctccaggtagctctaccccttctggtgcaaccggctctccaggtgcttctccgggcaccagctctaccggttctccaggttttccgactattccgctgtctcgtctgtttgataatgctatgctgcgtgcgcaccgtctgcaccagctggcctttgatacttaccaggaatttgaagaagcctacattcctaaagagcagaagtactctttcctgcaaaacccacagacttctctctgcttcagcgaatctattccgacgccttccaatcgcgaggaaactcagcaaaagtccaatctggaactactccgcatttctctgcttctgattcagagctggctagaaccagtgcaatttctgcgttccgtcttcgccaatagcctagtttatggcgcatccgacagcaacgtatacgatctcctgaaagatctcgaggaaggcattcagaccctgatgggtcgtctcgaggatggctctccgcgtactggtcagatcttcaagcagacttactctaaatttgatactaacagccacaatgacgatgcgcttctaaaaaactatggtctgctgtattgttttcgtaaagatatggacaaagttgaaaccttcctgcgtattgttcagtgtcgttccgttgagggcagctgtggtttctaaggtggtagcgaaccggcaacttccggctctgaaaccccaggtacttctgaaagcgctactcctgagtctggcccaggtagcgaacctgctacctctggctctgaaaccccaggtagcccggcaggctctccgacttccaccgaggaaggtacctctactgaaccttctgagggtagcgctccaggtagcgaaccggcaacctctggctctgaaaccccaggtagcgaacctgctacctccggctctgaaactccaggtagcgaaccggctacttccggttctgaaactccaggtacctctaccgaaccttccgaaggcagcgcaccaggtacttctgaaagcgcaacccctgaatccggtccaggtagcgaaccggctacttctggctctgagactccaggtacttctaccgaaccgtccgaaggtagcgcacca

SEQ ID NO: 731 - protein, 386 aa, Artificial Sequence
  Description of Artificial Sequence: Synthetic polypeptide
MAEPAGSPTSTEEGASPGTSSTGSPGSSTPSGATGSPGSSTPSGATGSPGFPTIPLSRLFDNAMLRAHRLHQLAFDTYQEFEEAYIPKEQKYSFLQNPQTSLCFSESIPTPSNREETQQKSNLELLRISLLLIQSWLEPVQFLRSVFANSLVYGASDSNVYDLLKDLEEGIQTLMGRLEDGSPRTGQIFKQTYSKFDTNSHNDDALLKNYGLLYCFRKDMDKVETFLRIVQCRSVEGSCGFGGSEPATSGSETPGTSESATPESGPGSEPATSGSETPGSPAGSPTSTEEGTSTEPSEGSAPGSEPATSGSETPGSEPATSGSETPGSEPATSGSETPGTSTEPSEGSAPGTSESATPESGPGSEPATSGSETPGTSTEPSEGSAP

SEQ ID NO: 732 - DNA, 1161 bp, Artificial Sequence
  Description of Artificial Sequence: Synthetic polynucleotide
atggctgaacctgctggctctccaacctccactgaggaaggtgcatccccgggcaccagctctaccggttctccaggtagctctaccccgtctggtgctaccggctctccaggtagctctaccccgtctggtgctactggctctccaggttttccgactattccgctgtctcgtctgtttgataatgctatgctgcgtgcgcaccgtctgcaccagctggcctttgatacttaccaggaatttgaagaagcctacattcctaaagagcagaagtactctttcctgcaaaacccacagacttctctctgcttcagcgaatctattccgacgccttccaatcgcgaggaaactcagcaaaagtccaatctggaactactccgcatttctctgcttctgattcagagctggctagaaccagtgcaatttctgcgttccgtcttcgccaatagcctagtttatggcgcatccgacagcaacgtatacgatctcctgaaagatctcgaggaaggcattcagaccctgatgggtcgtctcgaggatggctctccgcgtactggtcagatcttcaagcagacttactctaaatttgatactaacagccacaatgacgatgcgcttctaaaaaactatggtctgctgtattgttttcgtaaagatatggacaaagttgaaaccttcctgcgtattgttcagtgtcgttccgttgagggcagctgtggtttctaaggtggtagcgaaccggcaacttccggctctgaaaccccaggtacttctgaaagcgctactcctgagtctggcccaggtagcgaacctgctacctctggctctgaaaccccaggtagcccggcaggctctccgacttccaccgaggaaggtacctctactgaaccttctgagggtagcgctccaggtagcgaaccggcaacctctggctctgaaaccccaggtagcgaacctgctacctccggctctgaaactccaggtagcgaaccggctacttccggttctgaaactccaggtacctctaccgaaccttccgaaggcagcgcaccaggtacttctgaaagcgcaacccctgaatccggtccaggtagcgaaccggctacttctggctctgagactccaggtacttctaccgaaccgtccgaaggtagcgcacca

SEQ ID NO: 733 - protein, 481 aa, Artificial Sequence
  Description of Artificial Sequence: Synthetic polypeptide
GSEPATSGSETPGTSESATPESGPGSEPATSGSETPGSPAGSPTSTEEGTSTEPSEGSAPGSEPATSGSETPGSEPATSGSETPGSEPATSGSETPGTSTEPSEGSAPGTSESATPESGPGSEPATSGSETPGTSTEPSEGSAPGFPTIPLSRLFDNAMLRAHRLHQLAFDTYQEFEEAYIPKEQKYSFLQNPQTSLCFSESIPTPSNREETQQKSNLELLRISLLLIQSWLEPVQFLRSVFANSLVYGASDSNVYDLLKDLEEGIQTLMGRLEDGSPRTGQIFKQTYSKFDTNSHNDDALLKNYGLLYCFRKDMDKVETFLRIVQCRSVEGSCGFGGSEPATSGSETPGTSESATPESGPGSEPATSGSETPGSPAGSPTSTEEGTSTEPSEGSAPGSEPATSGSETPGSEPATSGSETPGSEPATSGSETPGTSTEPSEGSAPGTSESATPESGPGSEPATSGSETPGTSTEPSEGSAP

SEQ ID NO: 734 - DNA, 1446 bp, Artificial Sequence
  Description of Artificial Sequence: Synthetic polynucleotide
ggtagcgaaccggcaacttccggctctgaaaccccaggtacttctgaaagcgctactcctgagtctggcccaggtagcgaacctgctacctctggctctgaaaccccaggtagcccggcaggctctccgacttccaccgaggaaggtacctctactgaaccttctgagggtagcgctccaggtagcgaaccggcaacctctggctctgaaaccccaggtagcgaacctgctacctccggctctgaaactccaggtagcgaaccggctacttccggttctgaaactccaggtacctctaccgaaccttccgaaggcagcgcaccaggtacttctgaaagcgcaacccctgaatccggtccaggtagcgaaccggctacttctggctctgagactccaggtacttctaccgaaccgtccgaaggtagcgcaccaggttttccgactattccgctgtctcgtctgtttgataatgctatgctgcgtgcgcaccgtctgcaccagctggcctttgatacttaccaggaatttgaagaagcctacattcctaaagagcagaagtactctttcctgcaaaacccacagacttctctctgcttcagcgaatctattccgacgccttccaatcgcgaggaaactcagcaaaagtccaatctggaactactccgcatttctctgcttctgattcagagctggctagaaccagtgcaatttctgcgttccgtcttcgccaatagcctagtttatggcgcatccgacagcaacgtatacgatctcctgaaagatctcgaggaaggcattcagaccctgatgggtcgtctcgaggatggctctccgcgtactggtcagatcttcaagcagacttactctaaatttgatactaacagccacaatgacgatgcgcttctaaaaaactatggtctgctgtattgttttcgtaaagatatggacaaagttgaaaccttcctgcgtattgttcagtgtcgttccgttgagggcagctgtggtttctaaggtggtagcgaaccggcaacttccggctctgaaaccccaggtacttctgaaagcgctactcctgagtctggcccaggtagcgaacctgctacctctggctctgaaaccccaggtagcccggcaggctctccgacttccaccgaggaaggtacctctactgaaccttctgagggtagcgctccaggtagcgaaccggcaacctctggctctgaaaccccaggtagcgaacctgctacctccggctctgaaactccaggtagcgaaccggctacttccggttctgaaactccaggtacctctaccgaaccttccgaaggcagcgcaccaggtacttctgaaagcgcaacccctgaatccggtccaggtagcgaaccggctacttctggctctgagactccaggtacttctaccgaaccgtccgaaggtagcgcacca

SEQ ID NO: 735 - protein, 625 aa, Artificial Sequence
  Description of Artificial Sequence: Synthetic polypeptide
GTSESATPESGPGSEPATSGSETPGTSESATPESGPGSEPATSGSETPGTSESATPESGPGTSTEPSEGSAPGSPAGSPTSTEEGTSESATPESGPGSEPATSGSETPGTSESATPESGPGSPAGSPTSTEEGSPAGSPTSTEEGTSTEPSEGSAPGTSESATPESGPGTSESATPESGPGTSESATPESGPGSEPATSGSETPGSEPATSGSETPGSPAGSPTSTEEGTSTEPSEGSAPGTSTEPSEGSAPGSEPATSGSETPGTSESATPESGPGTSTEPSEGSAPGFPTIPLSRLFDNAMLRAHRLHQLAFDTYQEFEEAYIPKEQKYSFLQNPQTSLCFSESIPTPSNREETQQKSNLELLRISLLLIQSWLEPVQFLRSVFANSLVYGASDSNVYDLLKDLEEGIQTLMGRLEDGSPRTGQIFKQTYSKFDTNSHNDDALLKNYGLLYCFRKDMDKVETFLRIVQCRSVEGSCGFGGSEPATSGSETPGTSESATPESGPGSEPATSGSETPGSPAGSPTSTEEGTSTEPSEGSAPGSEPATSGSETPGSEPATSGSETPGSEPATSGSETPGTSTEPSEGSAPGTSESATPESGPGSEPATSGSETPGTSTEPSEGSAP

SEQ ID NO: 736 - DNA, 1878 bp, Artificial Sequence
  Description of Artificial Sequence: Synthetic polynucleotide
ggtacctctgaaagcgcaactcctgagtctggcccaggtagcgaacctgctacctccggctctgagactccaggtacctctgaaagcgcaaccccggaatctggtccaggtagcgaacctgcaacctctggctctgaaaccccaggtacctctgaaagcgctactcctgaatctggcccaggtacttctactgaaccgtccgagggcagcgcaccaggtagccctgctggctctccaacctccaccgaagaaggtacctctgaaagcgcaacccctgaatccggcccaggtagcgaaccggcaacctccggttctgaaaccccaggtacttctgaaagcgctactcctgagtccggcccaggtagcccggctggctctccgacttccaccgaggaaggtagcccggctggctctccaacttctactgaagaaggtacttctaccgaaccttccgagggcagcgcaccaggtacttctgaaagcgctacccctgagtccggcccaggtacttctgaaagcgctactcctgaatccggtccaggtacttctgaaagcgctaccccggaatctggcccaggtagcgaaccggctacttctggttctgaaaccccaggtagcgaaccggctacctccggttctgaaactccaggtagcccagcaggctctccgacttccactgaggaaggtacttctactgaaccttccgaaggcagcgcaccaggtacctctactgaaccttctgagggcagcgctccaggtagcgaacctgcaacctctggctctgaaaccccaggtacctctgaaagcgctactcctgaatctggcccaggtacttctactgaaccgtccgagggcagcgcaccaggttttccgactattccgctgtctcgtctgtttgataatgctatgctgcgtgcgcaccgtctgcaccagctggcctttgatacttaccaggaatttgaagaagcctacattcctaaagagcagaagtactctttcctgcaaaacccacagacttctctctgcttcagcgaatctattccgacgccttccaatcgcgaggaaactcagcaaaagtccaatctggaactactccgcatttctctgcttctgattcagagctggctagaaccagtgcaatttctgcgttccgtcttcgccaatagcctagtttatggcgcatccgacagcaacgtatacgatctcctgaaagatctcgaggaaggcattcagaccctgatgggtcgtctcgaggatggctctccgcgtactggtcagatcttcaagcagacttactctaaatttgatactaacagccacaatgacgatgcgcttctaaaaaactatggtctgctgtattgttttcgtaaagatatggacaaagttgaaaccttcctgcgtattgttcagtgtcgttccgttgagggcagctgtggtttctaaggtggtagcgaaccggcaacttccggctctgaaaccccaggtacttctgaaagcgctactcctgagtctggcccaggtagcgaacctgctacctctggctctgaaaccccaggtagcccggcaggctctccgacttccaccgaggaaggtacctctactgaaccttctgagggtagcgctccaggtagcgaaccggcaacctctggctctgaaaccccaggtagcgaacctgctacctccggctctgaaactccaggtagcgaaccggctacttccggttctgaaactccaggtacctctaccgaaccttccgaaggcagcgcaccaggtacttctgaaagcgcaacccctgaatccggtccaggtagcgaaccggctacttctggctctgagactccaggtacttctaccgaaccgtccgaaggtagcgcacca

SEQ ID NO: 737 - protein, 481 aa, Artificial Sequence
  Description of Artificial Sequence: Synthetic polypeptide
GTSTPESGSASPGTSPSGESSTAPGTSPSGESSTAPGSTSSTAESPGPGSTSESPSGTAPGSTSSTAESPGPGTSPSGESSTAPGTSTPESGSASPGSTSSTAESPGPGTSPSGESSTAPGTSPSGESSTAPGTSPSGESSTAPGFPTIPLSRLFDNAMLRAHRLHQLAFDTYQEFEEAYIPKEQKYSFLQNPQTSLCFSESIPTPSNREETQQKSNLELLRISLLLIQSWLEPVQFLRSVFANSLVYGASDSNVYDLLKDLEEGIQTLMGRLEDGSPRTGQIFKQTYSKFDTNSHNDDALLKNYGLLYCFRKDMDKVETFLRIVQCRSVEGSCGFGGSEPATSGSETPGTSESATPESGPGSEPATSGSETPGSPAGSPTSTEEGTSTEPSEGSAPGSEPATSGSETPGSEPATSGSETPGSEPATSGSETPGTSTEPSEGSAPGTSESATPESGPGSEPATSGSETPGTSTEPSEGSAP

SEQ ID NO: 738 - DNA, 1446 bp, Artificial Sequence
  Description of Artificial Sequence: Synthetic polynucleotide
ggtacttctactccggaaagcggttccgcatctccaggtacttctcctagcggtgaatcttctactgctccaggtacctctcctagcggcgaatcttctactgctccaggttctaccagctctaccgctgaatctcctggcccaggttctaccagcgaatccccgtctggcaccgcaccaggttctactagctctaccgcagaatctccgggtccaggtacttcccctagcggtgaatcttctactgctccaggtacctctactccggaaagcggctccgcatctccaggttctactagctctactgctgaatctcctggtccaggtacctcccctagcggcgaatcttctactgctccaggtacctctcctagcggcgaatcttctaccgctccaggtacctcccctagcggtgaatcttctaccgcaccaggttttccgactattccgctgtctcgtctgtttgataatgctatgctgcgtgcgcaccgtctgcaccagctggcctttgatacttaccaggaatttgaagaagcctacattcctaaagagcagaagtactctttcctgcaaaacccacagacttctctctgcttcagcgaatctattccgacgccttccaatcgcgaggaaactcagcaaaagtccaatctggaactactccgcatttctctgcttctgattcagagctggctagaaccagtgcaatttctgcgttccgtcttcgccaatagcctagtttatggcgcatccgacagcaacgtatacgatctcctgaaagatctcgaggaaggcattcagaccctgatgggtcgtctcgaggatggctctccgcgtactggtcagatcttcaagcagacttactctaaatttgatactaacagccacaatgacgatgcgcttctaaaaaactatggtctgctgtattgttttcgtaaagatatggacaaagttgaaaccttcctgcgtattgttcagtgtcgttccgttgagggcagctgtggtttctaaggtggtagcgaaccggcaacttccggctctgaaaccccaggtacttctgaaagcgctactcctgagtctggcccaggtagcgaacctgctacctctggctctgaaaccccaggtagcccggcaggctctccgacttccaccgaggaaggtacctctactgaaccttctgagggtagcgctccaggtagcgaaccggcaacctctggctctgaaaccccaggtagcgaacctgctacctccggctctgaaactccaggtagcgaaccggctacttccggttctgaaactccaggtacctctaccgaaccttccgaaggcagcgcaccaggtacttctgaaagcgcaacccctgaatccggtccaggtagcgaaccggctacttctggctctgagactccaggtacttctaccgaaccgtccgaaggtagcgcacca

SEQ ID NO: 739 - protein, 913 aa, Artificial Sequence
  Description of Artificial Sequence: Synthetic polypeptide
GSSESGSSEGGPGSGGEPSESGSSGSSESGSSEGGPGSSESGSSEGGPGSSESGSSEGGPGSSESGSSEGGPGSSESGSSEGGPGESPGGSSGSESGSEGSSGPGESSGSSESGSSEGGPGSSESGSSEGGPGSSESGSSEGGPGSGGEPSESGSSGESPGGSSGSESGESPGGSSGSESGSGGEPSESGSSGSSESGSSEGGPGSGGEPSESGSSGSGGEPSESGSSGSEGSSGPGESSGESPGGSSGSESGSGGEPSESGSSGSGGEPSESGSSGSGGEPSESGSSGSSESGSSEGGPGESPGGSSGSESGESPGGSSGSESGESPGGSSGSESGESPGGSSGSESGESPGGSSGSESGSSESGSSEGGPGSGGEPSESGSSGSEGSSGPGESSGSSESGSSEGGPGSGGEPSESGSSGSSESGSSEGGPGSGGEPSESGSSGESPGGSSGSESGESPGGSSGSESGSSESGSSEGGPGSGGEPSESGSSGSSESGSSEGGPGSGGEPSESGSSGSGGEPSESGSSGESPGGSSGSESGSEGSSGPGESSGSSESGSSEGGPGSEGSSGPGESSGFPTIPLSRLFDNAMLRAHRLHQLAFDTYQEFEEAYIPKEQKYSFLQNPQTSLCFSESIPTPSNREETQQKSNLELLRISLLLIQSWLEPVQFLRSVFANSLVYGASDSNVYDLLKDLEEGIQTLMGRLEDGSPRTGQIFKQTYSKFDTNSHNDDALLKNYGLLYCFRKDMDKVETFLRIVQCRSVEGSCGFGGSEPATSGSETPGTSESATPESGPGSEPATSGSETPGSPAGSPTSTEEGTSTEPSEGSAPGSEPATSGSETPGSEPATSGSETPGSEPATSGSETPGTSTEPSEGSAPGTSESATPESGPGSEPATSGSETPGTSTEPSEGSAP

SEQ ID NO: 740 - DNA, 2742 bp, Artificial Sequence
  Description of Artificial Sequence: Synthetic polynucleotide
ggttcctctgaaagcggttcttccgaaggtggtccaggttcctctgaaagcggttcttctgagggtggtccaggtgaatctccgggtggctccagcggttccgagtcaggttctggtggcgaaccttccgagtctggtagctcaggtgaatctccgggtggttctagcggttccgagtcaggtgaatctccgggtggttccagcggttctgagtcaggttcctccgaaagcggttcttctgagggcggtccaggttcctccgaaagcggttcttccgagggcggtccaggttcttctgaaagcggttcttccgagggcggtccaggtgaatctcctggtggttccagcggttccgagtcaggtgaatctccaggtggctctagcggttccgagtcaggtgaatctcctggtggttctagcggttctgaatcaggttcctccgaaagcggttcttctgagggcggtccaggttcctccgaaagcggttcttccgagggcggtccaggttcttctgaaagcggttcttccgagggcggtccaggttcctctgaaagcggttcttctgagggcggtccaggttcttccgaaagcggttcttccgagggcggtccaggttcttccgaaagcggttcttctgaaggcggtccaggttctggtggcgaaccgtccgagtctggtagctcaggtgaatctccgggtggctctagcggttccgagtcaggtgaatctcctggtggttccagcggttccgagtcaggttccggtggcgaaccgtccgaatctggtagctcaggtagcgaaggttcttctggtccaggcgaatcttcaggttcctctgaaagcggttcttctgagggcggtccaggttccggtggcgaaccgtccgaatctggtagctcaggtagcgaaggttcttctggtccaggcgaatcttcaggttcctctgaaagcggttcttctgagggcggtccaggttccggtggcgaaccttccgaatctggtagctcaggtgaatctccgggtggttctagcggttctgagtcaggttctggtggtgaaccttccgagtctggtagctcaggttctggtggcgaaccatccgagtctggtagctcaggttcttccgaaagcggttcttccgaaggcggtccaggttctggtggtgaaccgtccgaatctggtagctcaggttctggtggcgaaccatccgaatctggtagctcaggtagcgaaggttcttctggtcctggcgaatcttcaggtgaatctccaggtggctctagcggttccgaatcaggtagcgaaggttcttccggtccaggtgaatcttcaggtagcgaaggttcttctggtcctggtgaatcctcaggttccggtggcgaaccatctgaatctggtagctcaggttcctctgaaagcggttcttccgaaggtggtccaggttcctctgaaagcggttcttctgagggtggtccaggtgaatctccgggtggctccagcggttccgagtcaggttctggtggcgaaccatccgaatctggtagctcaggtagcgaaggttcttctggtcctggcgaatcttcaggtgaatctccaggtggctctagcggttccgaatcaggtagcgaaggttcttccggtcctggtgagtcttcaggtgaatctccaggtggctctagcggttccgagtcaggtagcgaaggttcttctggtcctggcgagtcctcaggttttccgactattccgctgtctcgtctgtttgataatgctatgctgcgtgcgcaccgtctgcaccagctggcctttgatacttaccaggaatttgaagaagcctacattcctaaagagcagaagtactctttcctgcaaaacccacagacttctctctgcttcagcgaatctattccgacgccttccaatcgcgaggaaactcagcaaaagtccaatctggaactactccgcatttctctgcttctgattcagagctggctagaaccagtgcaatttctgcgttccgtcttcgccaatagcctagtttatggcgcatccgacagcaacgtatacgatctcctgaaagatctcgaggaaggcattcagaccctgatgggtcgtctcgaggatggctctccgcgtactggtcagatcttcaagcagacttactctaaatttgatactaacagccacaatgacgatgcgcttctaaaaaactatggtctgctgtattgttttcgtaaagatatggacaaagttgaaaccttcctgcgtattgttcagtgtcgttccgttgagggcagctgtggtttctaaggtggtagcgaaccggcaacttccggctctgaaaccccaggtacttctgaaagcgctactcctgagtctggcccaggtagcgaacctgctacctctggctctgaaaccccaggtagcccggcaggctctccgacttccaccgaggaaggtacctctactgaaccttctgagggtagcgctccaggtagcgaaccggcaacctctggctctgaaaccccaggtagcgaacctgctacctccggctctgaaactccaggtagcgaaccggctacttccggttctgaaactccaggtacctctaccgaaccttccgaaggcagcgcaccaggtacttctgaaagcgcaacccctgaatccggtccaggtagcgaaccggctacttctggctctgagactccaggtacttctaccgaaccgtccgaaggtagcgcacca

SEQ ID NO: 741 - protein, 913 aa, Artificial Sequence
  Description of Artificial Sequence: Synthetic polypeptide
GSPAGSPTSTEEGTSESATPESGPGTSTEPSEGSAPGSPAGSPTSTEEGTSTEPSEGSAPGTSTEPSEGSAPGTSESATPESGPGSEPATSGSETPGSEPATSGSETPGSPAGSPTSTEEGTSESATPESGPGTSTEPSEGSAPGTSTEPSEGSAPGSPAGSPTSTEEGTSTEPSEGSAPGTSTEPSEGSAPGTSESATPESGPGTSTEPSEGSAPGTSESATPESGPGSEPATSGSETPGTSTEPSEGSAPGTSTEPSEGSAPGTSESATPESGPGTSESATPESGPGSPAGSPTSTEEGTSESATPESGPGSEPATSGSETPGTSESATPESGPGTSTEPSEGSAPGTSTEPSEGSAPGTSTEPSEGSAPGTSTEPSEGSAPGTSTEPSEGSAPGTSTEPSEGSAPGSPAGSPTSTEEGTSTEPSEGSAPGTSESATPESGPGSEPATSGSETPGTSESATPESGPGSEPATSGSETPGTSESATPESGPGTSTEPSEGSAPGTSESATPESGPGSPAGSPTSTEEGSPAGSPTSTEEGSPAGSPTSTEEGTSESATPESGPGTSTEPSEGSAPGFPTIPLSRLFDNAMLRAHRLHQLAFDTYQEFEEAYIPKEQKYSFLQNPQTSLCFSESIPTPSNREETQQKSNLELLRISLLLIQSWLEPVQFLRSVFANSLVYGASDSNVYDLLKDLEEGIQTLMGRLEDGSPRTGQIFKQTYSKFDTNSHNDDALLKNYGLLYCFRKDMDKVETFLRIVQCRSVEGSCGFGGSEPATSGSETPGTSESATPESGPGSEPATSGSETPGSPAGSPTSTEEGTSTEPSEGSAPGSEPATSGSETPGSEPATSGSETPGSEPATSGSETPGTSTEPSEGSAPGTSESATPESGPGSEPATSGSETPGTSTEPSEGSAP

SEQ ID NO: 742 - DNA, 2742 bp, Artificial Sequence
  Description of Artificial Sequence: Synthetic polynucleotide
ggtagcccggctggctctcctacctctactgaggaaggtacttctgaaagcgctactcctgagtctggtccaggtacctctactgaaccgtccgaaggtagcgctccaggtagcccagcaggctctccgacttccactgaggaaggtacttctactgaaccttccgaaggcagcgcaccaggtacctctactgaaccttctgagggcagcgctccaggtacttctgaaagcgctaccccggaatctggcccaggtagcgaaccggctacttctggttctgaaaccccaggtagcgaaccggctacctccggttctgaaactccaggtagcccggcaggctctccgacctctactgaggaaggtacttctgaaagcgcaaccccggagtccggcccaggtacctctaccgaaccgtctgagggcagcgcaccaggtacttctaccgaaccgtccgagggtagcgcaccaggtagcccagcaggttctcctacctccaccgaggaaggtacttctaccgaaccgtccgagggtagcgcaccaggtacctctactgaaccttctgagggcagcgctccaggtacttctgaaagcgctaccccggagtccggtccaggtacttctactgaaccgtccgaaggtagcgcaccaggtacttctgaaagcgcaacccctgaatccggtccaggtagcgaaccggctacttctggctctgagactccaggtacttctaccgaaccgtccgaaggtagcgcaccaggtacttctactgaaccgtctgaaggtagcgcaccaggtacttctgaaagcgcaaccccggaatccggcccaggtacctctgaaagcgcaaccccggagtccggcccaggtagccctgctggctctccaacctccaccgaagaaggtacctctgaaagcgcaacccctgaatccggcccaggtagcgaaccggcaacctccggttctgaaaccccaggtacctctgaaagcgctactccggagtctggcccaggtacctctactgaaccgtctgagggtagcgctccaggtacttctactgaaccgtccgaaggtagcgcaccaggtacttctaccgaaccgtccgaaggcagcgctccaggtacctctactgaaccttccgagggcagcgctccaggtacctctaccgaaccttctgaaggtagcgcaccaggtacttctaccgaaccgtccgagggtagcgcaccaggtagcccagcaggttctcctacctccaccgaggaaggtacttctaccgaaccgtccgagggtagcgcaccaggtacctctgaaagcgcaactcctgagtctggcccaggtagcgaacctgctacctccggctctgagactccaggtacctctgaaagcgcaaccccggaatctggtccaggtagcgaacctgcaacctctggctctgaaaccccaggtacctctgaaagcgctactcctgaatctggcccaggtacttctactgaaccgtccgagggcagcgcaccaggtacttctgaaagcgctactcctgagtccggcccaggtagcccggctggctctccgacttccaccgaggaaggtagcccggctggctctccaacttctactgaagaaggtagcccggcaggctctccgacctctactgaggaaggtacttctgaaagcgcaaccccggagtccggcccaggtacctctaccgaaccgtctgagggcagcgcaccaggttttccgactattccgctgtctcgtctgtttgataatgctatgctgcgtgcgcaccgtctgcaccagctggcctttgatacttaccaggaatttgaagaagcctacattcctaaagagcagaagtactctttcctgcaaaacccacagacttctctctgcttcagcgaatctattccgacgccttccaatcgcgaggaaactcagcaaaagtccaatctggaactactccgcatttctctgcttctgattcagagctggctagaaccagtgcaatttctgcgttccgtcttcgccaatagcctagtttatggcgcatccgacagcaacgtatacgatctcctgaaagatctcgaggaaggcattcagaccctgatgggtcgtctcgaggatggctctccgcgtactggtcagatcttcaagcagacttactctaaatttgatactaacagccacaatgacgatgcgcttctaaaaaactatggtctgctgtattgttttcgtaaagatatggacaaagttgaaaccttcctgcgtattgttcagtgtcgttccgttgagggcagctgtggtttctaaggtggtagcgaaccggcaacttccggctctgaaaccccaggtacttctgaaagcgctactcctgagtctggcccaggtagcgaacctgctacctctggctctgaaaccccaggtagcccggcaggctctccgacttccaccgaggaaggtacctctactgaaccttctgagggtagcgctccaggtagcgaaccggcaacctctggctctgaaaccccaggtagcgaacctgctacctccggctctgaaactccaggtagcgaaccggctacttccggttctgaaactccaggtacctctaccgaaccttccgaaggcagcgcaccaggtacttctgaaagcgcaacccctgaatccggtccaggtagcgaaccggctacttctggctctgagactccaggtacttctaccgaaccgtccgaaggtagcgcacca

SEQ ID NO: 743 - protein, 913 aa, Artificial Sequence
  Description of Artificial Sequence: Synthetic polypeptide
GSTSSTAESPGPGSTSSTAESPGPGSTSESPSGTAPGSTSSTAESPGPGSTSSTAESPGPGTSTPESGSASPGSTSESPSGTAPGTSPSGESSTAPGSTSESPSGTAPGSTSESPSGTAPGTSPSGESSTAPGSTSESPSGTAPGSTSESPSGTAPGTSPSGESSTAPGSTSESPSGTAPGSTSESPSGTAPGSTSESPSGTAPGTSTPESGSASPGSTSESPSGTAPGTSTPESGSASPGSTSSTAESPGPGSTSSTAESPGPGTSTPESGSASPGTSTPESGSASPGSTSESPSGTAPGTSTPESGSASPGTSTPESGSASPGSTSESPSGTAPGSTSESPSGTAPGSTSESPSGTAPGSTSSTAESPGPGTSTPESGSASPGTSTPESGSASPGSTSESPSGTAPGSTSESPSGTAPGTSTPESGSASPGSTSESPSGTAPGSTSESPSGTAPGTSTPESGSASPGTSPSGESSTAPGSTSSTAESPGPGTSPSGESSTAPGSTSSTAESPGPGTSTPESGSASPGSTSESPSGTAPGSTSSTAESPGPGTSTPESGSASPGTSTPESGSASPGFPTIPLSRLFDNAMLRAHRLHQLAFDTYQEFEEAYIPKEQKYSFLQNPQTSLCFSESIPTPSNREETQQKSNLELLRISLLLIQSWLEPVQFLRSVFANSLVYGASDSNVYDLLKDLEEGIQTLMGRLEDGSPRTGQIFKQTYSKFDTNSHNDDALLKNYGLLYCFRKDMDKVETFLRIVQCRSVEGSCGFGGSEPATSGSETPGTSESATPESGPGSEPATSGSETPGSPAGSPTSTEEGTSTEPSEGSAPGSEPATSGSETPGSEPATSGSETPGSEPATSGSETPGTSTEPSEGSAPGTSESATPESGPGSEPATSGSETPGTSTEPSEGSAP

SEQ ID NO: 744 - DNA, 2742 bp, Artificial Sequence
  Description of Artificial Sequence: Synthetic polynucleotide
ggttctactagctctaccgctgaatctcctggcccaggttccactagctctaccgcagaatctccgggcccaggttctactagcgaatccccttctggtaccgctccaggttctactagctctaccgctgaatctccgggtccaggttctaccagctctactgcagaatctcctggcccaggtacttctactccggaaagcggttccgcttctccaggttctaccagcgaatctccttctggcaccgctccaggtacctctcctagcggcgaatcttctaccgctccaggttctactagcgaatctccttctggcactgcaccaggttctaccagcgaatctccttctggcaccgctccaggtacctctcctagcggcgaatcttctaccgctccaggttctactagcgaatctccttctggcactgcaccaggttctaccagcgaatctccttctggcaccgctccaggtacctctcctagcggcgaatcttctaccgctccaggttctactagcgaatctccttctggcactgcaccaggttctactagcgaatctccttctggcactgcaccaggttctaccagcgaatctccgtctggcactgcaccaggtacctctacccctgaaagcggttccgcttctccaggttctactagcgaatctccttctggtaccgctccaggtacttctacccctgaaagcggctccgcttctccaggttccactagctctaccgctgaatctccgggtccaggttctactagctctactgcagaatctcctggcccaggtacctctactccggaaagcggctctgcatctccaggtacttctacccctgaaagcggttctgcatctccaggttctactagcgaatccccgtctggtaccgcaccaggtacttctaccccggaaagcggctctgcttctccaggtacttctaccccggaaagcggctccgcatctccaggttctactagcgaatctccttctggtaccgctccaggttctaccagcgaatccccgtctggtactgctccaggttctaccagcgaatctccttctggtactgcaccaggttctactagctctactgcagaatctcctggcccaggtacctctactccggaaagcggctctgcatctccaggtacttctacccctgaaagcggttctgcatctccaggttctactagcgaatctccttctggcactgcaccaggttctaccagcgaatctccgtctggcactgcaccaggtacctctacccctgaaagcggttccgcttctccaggttctactagcgaatctccttctggcactgcaccaggttctaccagcgaatctccgtctggcactgcaccaggtacctctacccctgaaagcggttccgcttctccaggtacttctccgagcggtgaatcttctaccgcaccaggttctactagctctaccgctgaatctccgggcccaggtacttctccgagcggtgaatcttctactgctccaggttccactagctctactgctgaatctcctggcccaggtacttctactccggaaagcggttccgcttctccaggttctactagcgaatctccgtctggcaccgcaccaggttctactagctctactgcagaatctcctggcccaggtacctctactccggaaagcggctctgcatctccaggtacttctacccctgaaagcggttctgcatctccaggttttccgactattccgctgtctcgtctgtttgataatgctatgctgcgtgcgcaccgtctgcaccagctggcctttgatacttaccaggaatttgaagaagcctacattcctaaagagcagaagtactctttcctgcaaaacccacagacttctctctgcttcagcgaatctattccgacgccttccaatcgcgaggaaactcagcaaaagtccaatctggaactactccgcatttctctgcttctgattcagagctggctagaaccagtgcaatttctgcgttccgtcttcgccaatagcctagtttatggcgcatccgacagcaacgtatacgatctcctgaaagatctcgaggaaggcattcagaccctgatgggtcgtctcgaggatggctctccgcgtactggtcagatcttcaagcagacttactctaaatttgatactaacagccacaatgacgatgcgcttctaaaaaactatggtctgctgtattgttttcgtaaagatatggacaaagttgaaaccttcctgcgtattgttcagtgtcgttccgttgagggcagctgtggtttctaaggtggtagcgaaccggcaacttccggctctgaaaccccaggtacttctgaaagcgctactcctgagtctggcccaggtagcgaacctgctacctctggctctgaaaccccaggtagcccggcaggctctccgacttccaccgaggaaggtacctctactgaaccttctgagggtagcgctccaggtagcgaaccggcaacctctggctctgaaaccccaggtagcgaacctgctacctccggctctgaaactccaggtagcgaaccggctacttccggttctgaaactccaggtacctctaccgaaccttccgaaggcagcgcaccaggtacttctgaaagcgcaacccctgaatccggtccaggtagcgaaccggctacttctggctctgagactccaggtacttctaccgaaccgtccgaaggtagcgcacca

SEQ ID NO: 745 - protein, 962 aa, Artificial Sequence
  Description of Artificial Sequence: Synthetic polypeptide
MAEPAGSPTSTEEGTPGSGTASSSPGSSTPSGATGSPGASPGTSSTGSPGSPAGSPTSTEEGTSESATPESGPGTSTEPSEGSAPGSPAGSPTSTEEGTSTEPSEGSAPGTSTEPSEGSAPGTSESATPESGPGSEPATSGSETPGSEPATSGSETPGSPAGSPTSTEEGTSESATPESGPGTSTEPSEGSAPGTSTEPSEGSAPGSPAGSPTSTEEGTSTEPSEGSAPGTSTEPSEGSAPGTSESATPESGPGTSTEPSEGSAPGTSESATPESGPGSEPATSGSETPGTSTEPSEGSAPGTSTEPSEGSAPGTSESATPESGPGTSESATPESGPGSPAGSPTSTEEGTSESATPESGPGSEPATSGSETPGTSESATPESGPGTSTEPSEGSAPGTSTEPSEGSAPGTSTEPSEGSAPGTSTEPSEGSAPGTSTEPSEGSAPGTSTEPSEGSAPGSPAGSPTSTEEGTSTEPSEGSAPGTSESATPESGPGSEPATSGSETPGTSESATPESGPGSEPATSGSETPGTSESATPESGPGTSTEPSEGSAPGTSESATPESGPGSPAGSPTSTEEGSPAGSPTSTEEGSPAGSPTSTEEGTSESATPESGPGTSTEPSEGSAPGFPTIPLSRLFDNAMLRAHRLHQLAFDTYQEFEEAYIPKEQKYSFLQNPQTSLCFSESIPTPSNREETQQKSNLELLRISLLLIQSWLEPVQFLRSVFANSLVYGASDSNVYDLLKDLEEGIQTLMGRLEDGSPRTGQIFKQTYSKFDTNSHNDDALLKNYGLLYCFRKDMDKVETFLRIVQCRSVEGSCGFGGSEPATSGSETPGTSESATPESGPGSEPATSGSETPGSPAGSPTSTEEGTSTEPSEGSAPGSEPATSGSETPGSEPATSGSETPGSEPATSGSETPGTSTEPSEGSAPGTSESATPESGPGSEPATSGSETPGTSTEPSEGSAP

SEQ ID NO: 746 - DNA, 2889 bp, Artificial Sequence
  Description of Artificial Sequence: Synthetic polynucleotide
atggctgaacctgctggctctccaacctccactgaggaaggtaccccgggtagcggtactgcttcttcctctccaggtagctctaccccttctggtgcaaccggctctccaggtgcttctccgggcaccagctctaccggttctccaggtagcccggctggctctcctacctctactgaggaaggtacttctgaaagcgctactcctgagtctggtccaggtacctctactgaaccgtccgaaggtagcgctccaggtagcccagcaggctctccgacttccactgaggaaggtacttctactgaaccttccgaaggcagcgcaccaggtacctctactgaaccttctgagggcagcgctccaggtacttctgaaagcgctaccccggaatctggcccaggtagcgaaccggctacttctggttctgaaaccccaggtagcgaaccggctacctccggttctgaaactccaggtagcccggcaggctctccgacctctactgaggaaggtacttctgaaagcgcaaccccggagtccggcccaggtacctctaccgaaccgtctgagggcagcgcaccaggtacttctaccgaaccgtccgagggtagcgcaccaggtagcccagcaggttctcctacctccaccgaggaaggtacttctaccgaaccgtccgagggtagcgcaccaggtacctctactgaaccttctgagggcagcgctccaggtacttctgaaagcgctaccccggagtccggtccaggtacttctactgaaccgtccgaaggtagcgcaccaggtacttctgaaagcgcaacccctgaatccggtccaggtagcgaaccggctacttctggctctgagactccaggtacttctaccgaaccgtccgaaggtagcgcaccaggtacttctactgaaccgtctgaaggtagcgcaccaggtacttctgaaagcgcaaccccggaatccggcccaggtacctctgaaagcgcaaccccggagtccggcccaggtagccctgctggctctccaacctccaccgaagaaggtacctctgaaagcgcaacccctgaatccggcccaggtagcgaaccggcaacctccggttctgaaaccccaggtacctctgaaagcgctactccggagtctggcccaggtacctctactgaaccgtctgagggtagcgctccaggtacttctactgaaccgtccgaaggtagcgcaccaggtacttctaccgaaccgtccgaaggcagcgctccaggtacctctactgaaccttccgagggcagcgctccaggtacctctaccgaaccttctgaaggtagcgcaccaggtacttctaccgaaccgtccgagggtagcgcaccaggtagcccagcaggttctcctacctccaccgaggaaggtacttctaccgaaccgtccgagggtagcgcaccaggtacctctgaaagcgcaactcctgagtctggcccaggtagcgaacctgctacctccggctctgagactccaggtacctctgaaagcgcaaccccggaatctggtccaggtagcgaacctgcaacctctggctctgaaaccccaggtacctctgaaagcgctactcctgaatctggcccaggtacttctactgaaccgtccgagggcagcgcaccaggtacttctgaaagcgctactcctgagtccggcccaggtagcccggctggctctccgacttccaccgaggaaggtagcccggctggctctccaacttctactgaagaaggtagcccggcaggctctccgacctctactgaggaaggtacttctgaaagcgcaaccccggagtccggcccaggtacctctaccgaaccgtctgagggcagcgcaccaggttttccgactattccgctgtctcgtctgtttgataatgctatgctgcgtgcgcaccgtctgcaccagctggcctttgatacttaccaggaatttgaagaagcctacattcctaaagagcagaagtactctttcctgcaaaacccacagacttctctctgcttcagcgaatctattccgacgccttccaatcgcgaggaaactcagcaaaagtccaatctggaactactccgcatttctctgcttctgattcagagctggctagaaccagtgcaatttctgcgttccgtcttcgccaatagcctagtttatggcgcatccgacagcaacgtatacgatctcctgaaagatctcgaggaaggcattcagaccctgatgggtcgtctcgaggatggctctccgcgtactggtcagatcttcaagcagacttactctaaatttgatactaacagccacaatgacgatgcgcttctaaaaaactatggtctgctgtattgttttcgtaaagatatggacaaagttgaaaccttcctgcgtattgttcagtgtcgttccgttgagggcagctgtggtttctaaggtggtagcgaaccggcaacttccggctctgaaaccccaggtacttctgaaagcgctactcctgagtctggcccaggtagcgaacctgctacctctggctctgaaaccccaggtagcccggcaggctctccgacttccaccgaggaaggtacctctactgaaccttctgagggtagcgctccaggtagcgaaccggcaacctctggctctgaaaccccaggtagcgaacctgctacctccggctctgaaactccaggtagcgaaccggctacttccggttctgaaactccaggtacctctaccgaaccttccgaaggcagcgcaccaggtacttctgaaagcgcaacccctgaatccggtccaggtagcgaaccggctacttctggctctgagactccaggtacttctaccgaaccgtccgaaggtagcgcacca

SEQ ID NO: 747 - protein, 1173 aa, Artificial Sequence
  Description of Artificial Sequence: Synthetic polypeptide
GSSESGSSEGGPGSSESGSSEGGPGESPGGSSGSESGSGGEPSESGSSGESPGGSSGSESGESPGGSSGSESGSSESGSSEGGPGSSESGSSEGGPGSSESGSSEGGPGESPGGSSGSESGESPGGSSGSESGESPGGSSGSESGSSESGSSEGGPGSSESGSSEGGPGSSESGSSEGGPGSSESGSSEGGPGSSESGSSEGGPGSSESGSSEGGPGSGGEPSESGSSGESPGGSSGSESGESPGGSSGSESGSGGEPSESGSSGSEGSSGPGESSGSSESGSSEGGPGSGGEPSESGSSGSEGSSGPGESSGSSESGSSEGGPGSGGEPSESGSSGESPGGSSGSESGSGGEPSESGSSGSGGEPSESGSSGSSESGSSEGGPGSGGEPSESGSSGSGGEPSESGSSGSEGSSGPGESSGESPGGSSGSESGSEGSSGPGESSGSEGSSGPGESSGSGGEPSESGSSGSSESGSSEGGPGSSESGSSEGGPGESPGGSSGSESGSGGEPSESGSSGSEGSSGPGESSGESPGGSSGSESGSEGSSGPGSSESGSSEGGPGSGGEPSESGSSGSEGSSGPGESSGSEGSSGPGESSGSEGSSGPGESSGSGGEPSESGSSGSGGEPSESGSSGESPGGSSGSESGESPGGSSGSESGSGGEPSESGSSGSEGSSGPGESSGESPGGSSGSESGSSESGSSEGGPGSSESGSSEGGPGSSESGSSEGGPGSGGEPSESGSSGSSESGSSEGGPGESPGGSSGSESGSGGEPSESGSSGSSESGSSEGGPGESPGGSSGSESGSGGEPSESGSSGESPGGSSGSESGSGGEPSESGSSGFPTIPLSRLFDNAMLRAHRLHQLAFDTYQEFEEAYIPKEQKYSFLQNPQTSLCFSESIPTPSNREETQQKSNLELLRISLLLIQSWLEPVQFLRSVFANSLVYGASDSNVYDLLKDLEEGIQTLMGRLEDGSPRTGQIFKQTYSKFDTNSHNDDALLKNYGLLYCFRKDMDKVETFLRIVQCRSVEGSCGFGGSEPATSGSETPGTSESATPESGPGSEPATSGSETPGSPAGSPTSTEEGTSTEPSEGSAPGSEPATSGSETPGSEPATSGSETPGSEPATSGSETPGTSTEPSEGSAPGTSESATPESGPGSEPATSGSETPGTSTEPSEGSAP

SEQ ID NO: 748 - DNA, 3522 bp, Artificial Sequence
  Description of Artificial Sequence: Synthetic polynucleotide
ggttcctctgaaagcggttcttccgaaggtggtccaggttcctctgaaagcggttcttctgagggtggtccaggtgaatctccgggtggctccagcggttccgagtcaggttctggtggcgaaccttccgagtctggtagctcaggtgaatctccgggtggttctagcggttccgagtcaggtgaatctccgggtggttccagcggttctgagtcaggttcctccgaaagcggttcttctgagggcggtccaggttcctccgaaagcggttcttccgagggcggtccaggttcttctgaaagcggttcttccgagggcggtccaggtgaatctcctggtggttccagcggttccgagtcaggtgaatctccaggtggctctagcggttccgagtcaggtgaatctcctggtggttctagcggttctgaatcaggttcctccgaaagcggttcttctgagggcggtccaggttcctccgaaagcggttcttccgagggcggtccaggttcttctgaaagcggttcttccgagggcggtccaggttcctctgaaagcggttcttctgagggcggtccaggttcttccgaaagcggttcttccgagggcggtccaggttcttccgaaagcggttcttctgaaggcggtccaggttctggtggcgaaccgtccgagtctggtagctcaggtgaatctccgggtggctctagcggttccgagtcaggtgaatctcctggtggttccagcggttccgagtcaggttccggtggcgaaccgtccgaatctggtagctcaggtagcgaaggttcttctggtccaggcgaatcttcaggttcctctgaaagcggttcttctgagggcggtccaggttccggtggcgaaccgtccgaatctggtagctcaggtagcgaaggttcttctggtccaggcgaatcttcaggttcctctgaaagcggttcttctgagggcggtccaggttccggtggcgaaccttccgaatctggtagctcaggtgaatctccgggtggttctagcggttctgagtcaggttctggtggtgaaccttccgagtctggtagctcaggttctggtggcgaaccatccgagtctggtagctcaggttcttccgaaagcggttcttccgaaggcggtccaggttctggtggtgaaccgtccgaatctggtagctcaggttctggtggcgaaccatccgaatctggtagctcaggtagcgaaggttcttctggtcctggcgaatcttcaggtgaatctccaggtggctctagcggttccgaatcaggtagcgaaggttcttccggtccaggtgaatcttcaggtagcgaaggttcttctggtcctggtgaatcctcaggttccggtggcgaaccatctgaatctggtagctcaggttcctctgaaagcggttcttccgaaggtggtccaggttcctctgaaagcggttcttctgagggtggtccaggtgaatctccgggtggctccagcggttccgagtcaggttctggtggcgaaccatccgaatctggtagctcaggtagcgaaggttcttctggtcctggcgaatcttcaggtgaatctccaggtggctctagcggttccgaatcaggtagcgaaggttcttccggtccaggttcctctgaaagcggttcttctgagggcggtccaggttctggtggcgaaccatctgaatctggtagctcaggtagcgaaggttcttccggtccgggtgaatcttcaggtagcgaaggttcttccggtccaggtgaatcttcaggtagcgaaggttcttctggtcctggtgaatcctcaggttccggtggcgaaccatctgaatctggtagctcaggttctggtggcgaaccatccgaatctggtagctcaggtgaatctccgggtggctccagcggttctgaatcaggtgaatctcctggtggctccagcggttctgagtcaggttctggtggcgaaccatccgaatctggtagctcaggtagcgaaggttcttctggtcctggcgaatcttcaggtgaatctccaggtggctctagcggttccgaatcaggttcctctgaaagcggttcttctgagggcggtccaggttcttccgaaagcggttcttccgagggcggtccaggttcttccgaaagcggttcttctgaaggcggtccaggttctggtggcgaaccgtccgaatctggtagctcaggttcctccgaaagcggttcttctgaaggtggtccaggtgaatctccaggtggttctagcggttctgaatcaggttctggtggcgaaccgtccgaatctggtagctcaggttcctccgaaagcggttcttctgaaggtggtccaggtgaatctccaggtggttctagcggttctgaatcaggttctggtggcgaaccgtccgaatctggtagctcaggtgaatctcctggtggttccagcggttccgagtcaggttctggtggcgaaccttccgaatctggtagctcaggttttccgactattccgctgtctcgtctgtttgataatgctatgctgcgtgcgcaccgtctgcaccagctggcctttgatacttaccaggaatttgaagaagcctacattcctaaagagcagaagtactctttcctgcaaaacccacagacttctctctgcttcagcgaatctattccgacgccttccaatcgcgaggaaactcagcaaaagtccaatctggaactactccgcatttctctgcttctgattcagagctggctagaaccagtgcaatttctgcgttccgtcttcgccaatagcctagtttatggcgcatccgacagcaacgtatacgatctcctgaaagatctcgaggaaggcattcagaccctgatgggtcgtctcgaggatggctctccgcgtactggtcagatcttcaagcagacttactctaaatttgatactaacagccacaatgacgatgcgcttctaaaaaactatggtctgctgtattgttttcgtaaagatatggacaaagttgaaaccttcctgcgtattgttcagtgtcgttccgttgagggcagctgtggtttctaaggtggtagcgaaccggcaacttccggctctgaaaccccaggtacttctgaaagcgctactcctgagtctggcccaggtagcgaacctgctacctctggctctgaaaccccaggtagcccggcaggctctccgacttccaccgaggaaggtacctctactgaaccttctgagggtagcgctccaggtagcgaaccggcaacctctggctctgaaaccccaggtagcgaacctgctacctccggctctgaaactccaggtagcgaaccggctacttccggttctgaaactccaggtacctctaccgaaccttccgaaggcagcgcaccaggtacttctgaaagcgcaacccctgaatccggtccaggtagcgaaccggctacttctggctctgagactccaggtacttctaccgaaccgtccgaaggtagcgcacca

SEQ ID NO: 749 - protein, 1201 aa, Artificial Sequence
  Description of Artificial Sequence: Synthetic polypeptide
GSPAGSPTSTEEGTSESATPESGPGTSTEPSEGSAPGSPAGSPTSTEEGTSTEPSEGSAPGTSTEPSEGSAPGTSESATPESGPGSEPATSGSETPGSEPATSGSETPGSPAGSPTSTEEGTSESATPESGPGTSTEPSEGSAPGTSTEPSEGSAPGSPAGSPTSTEEGTSTEPSEGSAPGTSTEPSEGSAPGTSESATPESGPGTSTEPSEGSAPGTSESATPESGPGSEPATSGSETPGTSTEPSEGSAPGTSTEPSEGSAPGTSESATPESGPGTSESATPESGPGSPAGSPTSTEEGTSESATPESGPGSEPATSGSETPGTSESATPESGPGTSTEPSEGSAPGTSTEPSEGSAPGTSTEPSEGSAPGTSTEPSEGSAPGTSTEPSEGSAPGTSTEPSEGSAPGSPAGSPTSTEEGTSTEPSEGSAPGTSESATPESGPGSEPATSGSETPGTSESATPESGPGSEPATSGSETPGTSESATPESGPGTSTEPSEGSAPGTSESATPESGPGSPAGSPTSTEEGSPAGSPTSTEEGSPAGSPTSTEEGTSESATPESGPGTSTEPSEGSAPGTSESATPESGPGSEPATSGSETPGTSESATPESGPGSEPATSGSETPGTSESATPESGPGTSTEPSEGSAPGSPAGSPTSTEEGTSESATPESGPGSEPATSGSETPGTSESATPESGPGSPAGSPTSTEEGSPAGSPTSTEEGTSTEPSEGSAPGTSESATPESGPGTSESATPESGPGTSESATPESGPGSEPATSGSETPGSEPATSGSETPGSPAGSPTSTEEGTSTEPSEGSAPGTSTEPSEGSAPGSEPATSGSETPGTSESATPESGPGTSTEPSEGSAPGFPTIPLSRLFDNAMLRAHRLHQLAFDTYQEFEEAYIPKEQKYSFLQNPQTSLCFSESIPTPSNREETQQKSNLELLRISLLLIQSWLEPVQFLRSVFANSLVYGASDSNVYDLLKDLEEGIQTLMGRLEDGSPRTGQIFKQTYSKFDTNSHNDDALLKNYGLLYCFRKDMDKVETFLRIVQCRSVEGSCGFGGSEPATSGSETPGTSESATPESGPGSEPATSGSETPGSPAGSPTSTEEGTSTEPSEGSAPGSEPATSGSETPGSEPATSGSETPGSEPATSGSETPGTSTEPSEGSAPGTSESATPESGPGSEPATSGSETPGTSTEPSEGSAP

SEQ ID NO: 750 - DNA, 3606 bp, Artificial Sequence
  Description of Artificial Sequence: Synthetic polynucleotide
ggtagcccggctggctctcctacctctactgaggaaggtacttctgaaagcgctactcctgagtctggtccaggtacctctactgaaccgtccgaaggtagcgctccaggtagcccagcaggctctccgacttccactgaggaaggtacttctactgaaccttccgaaggcagcgcaccaggtacctctactgaaccttctgagggcagcgctccaggtacttctgaaagcgctaccccggaatctggcccaggtagcgaaccggctacttctggttctgaaaccccaggtagcgaaccggctacctccggttctgaaactccaggtagcccggcaggctctccgacctctactgaggaaggtacttctgaaagcgcaaccccggagtccggcccaggtacctctaccgaaccgtctgagggcagcgcaccaggtacttctaccgaaccgtccgagggtagcgcaccaggtagcccagcaggttctcctacctccaccgaggaaggtacttctaccgaaccgtccgagggtagcgcaccaggtacctctactgaaccttctgagggcagcgctccaggtacttctgaaagcgctaccccggagtccggtccaggtacttctactgaaccgtccgaaggtagcgcaccaggtacttctgaaagcgcaacccctgaatccggtccaggtagcgaaccggctacttctggctctgagactccaggtacttctaccgaaccgtccgaaggtagcgcaccaggtacttctactgaaccgtctgaaggtagcgcaccaggtacttctgaaagcgcaaccccggaatccggcccaggtacctctgaaagcgcaaccccggagtccggcccaggtagccctgctggctctccaacctccaccgaagaaggtacctctgaaagcgcaacccctgaatccggcccaggtagcgaaccggcaacctccggttctgaaaccccaggtacctctgaaagcgctactccggagtctggcccaggtacctctactgaaccgtctgagggtagcgctccaggtacttctactgaaccgtccgaaggtagcgcaccaggtacttctaccgaaccgtccgaaggcagcgctccaggtacctctactgaaccttccgagggcagcgctccaggtacctctaccgaaccttctgaaggtagcgcaccaggtacttctaccgaaccgtccgagggtagcgcaccaggtagcccagcaggttctcctacctccaccgaggaaggtacttctaccgaaccgtccgagggtagcgcaccaggtacctctgaaagcgcaactcctgagtctggcccaggtagcgaacctgctacctccggctctgagactccaggtacctctgaaagcgcaaccccggaatctggtccaggtagcgaacctgcaacctctggctctgaaaccccaggtacctctgaaagcgctactcctgaatctggcccaggtacttctactgaaccgtccgagggcagcgcaccaggtacttctgaaagcgctactcctgagtccggcccaggtagcccggctggctctccgacttccaccgaggaaggtagcccggctggctctccaacttctactgaagaaggtagcccggcaggctctccgacctctactgaggaaggtacttctgaaagcgcaaccccggagtccggcccaggtacctctaccgaaccgtctgagggcagcgcaccaggtacctctgaaagcgcaactcctgagtctggcccaggtagcgaacctgctacctccggctctgagactccaggtacctctgaaagcgcaaccccggaatctggtccaggtagcgaacctgcaacctctggctctgaaaccccaggtacctctgaaagcgctactcctgaatctggcccaggtacttctactgaaccgtccgagggcagcgcaccaggtagccctgctggctctccaacctccaccgaagaaggtacctctgaaagcgcaacccctgaatccggcccaggtagcgaaccggcaacctccggttctgaaaccccaggtacttctgaaagcgctactcctgagtccggcccaggtagcccggctggctctccgacttccaccgaggaaggtagcccggctggctctccaacttctactgaagaaggtacttctaccgaaccttccgagggcagcgcaccaggtacttctgaaagcgctacccctgagtccggcccaggtacttctgaaagcgctactcctgaatccggtccaggtacttctgaaagcgctaccccggaatctggcccaggtagcgaaccggctacttctggttctgaaaccccaggtagcgaaccggctacctccggttctgaaactccaggtagcccagcaggctctccgacttccactgaggaaggtacttctactgaaccttccgaaggcagcgcaccaggtacctctactgaaccttctgagggcagcgctccaggtagcgaacctgcaacctctggctctgaaaccccaggtacctctgaaagcgctactcctgaatctggcccaggtacttctactgaaccgtccgagggcagcgcaccaggttttccgactattccgctgtctcgtctgtttgataatgctatgctgcgtgcgcaccgtctgcaccagctggcctttgatacttaccaggaatttgaagaagcctacattcctaaagagcagaagtactctttcctgcaaaacccacagacttctctctgcttcagcgaatctattccgacgccttccaatcgcgaggaaactcagcaaaagtccaatctggaactactccgcatttctctgcttctgattcagagctggctagaaccagtgcaatttctgcgttccgtcttcgccaatagcctagtttatggcgcatccgacagcaacgtatacgatctcctgaaagatctcgaggaaggcattcagaccctgatgggtcgtctcgaggatggctctccgcgtactggtcagatcttcaagcagacttactctaaatttgatactaacagccacaatgacgatgcgcttctaaaaaactatggtctgctgtattgttttcgtaaagatatggacaaagttgaaaccttcctgcgtattgttcagtgtcgttccgttgagggcagctgtggtttctaaggtggtagcgaaccggcaacttccggctctgaaaccccaggtacttctgaaagcgctactcctgagtctggcccaggtagcgaacctgctacctctggctctgaaaccccaggtagcccggcaggctctccgacttccaccgaggaaggtacctctactgaaccttctgagggtagcgctccaggtagcgaaccggcaacctctggctctgaaaccccaggtagcgaacctgctacctccggctctgaaactccaggtagcgaaccggctacttccggttctgaaactccaggtacctctaccgaaccttccgaaggcagcgcaccaggtacttctgaaagcgcaacccctgaatccggtccaggtagcgaaccggctacttctggctctgagactccaggtacttctaccgaaccgtccgaaggtagcgcacca

SEQ ID NO: 751 - protein, 1212 aa, Artificial Sequence
  Description of Artificial Sequence: Synthetic polypeptide
  MOD_RES (430)..(432): Any amino acid
  MOD_RES (443)..(446): Any amino acid
GSTSESPSGTAPGTSPSGESSTAPGSTSESPSGTAPGSTSESPSGTAPGTSTPESGSASPGTSTPESGSASPGSTSESPSGTAPGSTSESPSGTAPGTSPSGESSTAPGSTSESPSGTAPGTSPSGESSTAPGTSPSGESSTAPGSTSSTAESPGPGTSPSGESSTAPGTSPSGESSTAPGSTSSTAESPGPGTSTPESGSASPGTSTPESGSASPGSTSESPSGTAPGSTSESPSGTAPGTSTPESGSASPGSTSSTAESPGPGTSTPESGSASPGSTSESPSGTAPGTSPSGESSTAPGSTSSTAESPGPGTSPSGESSTAPGTSTPESGSASPGSTSSTAESPGPGSTSSTAESPGPGSTSSTAESPGPGSTSSTAESPGPGTSPSGESSTAPGSTSESPSGTAPGSTSESPSGTAPGTSTPESGPXXXGASASGAPSTXXXXSESPSGTAPGSTSESPSGTAPGSTSESPSGTAPGSTSESPSGTAPGSTSESPSGTAPGSTSESPSGTAPGTSTPESGSASPGTSPSGESSTAPGTSPSGESSTAPGSTSSTAESPGPGTSPSGESSTAPGTSTPESGSASPGSTSESPSGTAPGSTSESPSGTAPGTSPSGESSTAPGSTSESPSGTAPGTSTPESGSASPGTSTPESGSASPGSTSESPSGTAPGTSTPESGSASPGSTSSTAESPGPGSTSESPSGTAPGSTSESPSGTAPGTSPSGESSTAPGSTSSTAESPGPGTSPSGESSTAPGTSTPESGSASPGTSPSGESSTAPGTSPSGESSTAPGTSPSGESSTAPGSTSSTAESPGPGSTSSTAESPGPGTSPSGESSTAPGSSPSASTGTGPGSSTPSGATGSPGSSTPSGATGSPGFPTIPLSRLFDNAMLRAHRLHQLAFDTYQEFEEAYIPKEQKYSFLQNPQTSLCFSESIPTPSNREETQQKSNLELLRISLLLIQSWLEPVQFLRSVFANSLVYGASDSNVYDLLKDLEEGIQTLMGRLEDGSPRTGQIFKQTYSKFDTNSHNDDALLKNYGLLYCFRKDMDKVETFLRIVQCRSVEGSCGFGGSEPATSGSETPGTSESATPESGPGSEPATSGSETPGSPAGSPTSTEEGTSTEPSEGSAPGSEPATSGSETPGSEPATSGSETPGSEPATSGSETPGTSTEPSEGSAPGTSESATPESGPGSEPATSGSETPGTSTEPSEGSAP

SEQ ID NO: 752 - DNA, 3639 bp, Artificial Sequence
  Description of Artificial Sequence: Synthetic polynucleotide
  modified_base (1287)..(1298): a, c, t, g, unknown or other
  modified_base (1330)..(1337): a, c, t, g, unknown or other
ggttctaccagcgaatctccttctggcaccgctccaggtacctctcctagcggcgaatcttctaccgctccaggttctactagcgaatctccttctggcactgcaccaggttctactagcgaatccccgtctggtactgctccaggtacttctactcctgaaagcggttccgcttctccaggtacctctactccggaaagcggttctgcatctccaggttctaccagcgaatctccttctggcaccgctccaggttctactagcgaatccccgtctggtaccgcaccaggtacttctcctagcggcgaatcttctaccgcaccaggttctactagcgaatctccgtctggcactgctccaggtacttctcctagcggtgaatcttctaccgctccaggtacttcccctagcggcgaatcttctaccgctccaggttctactagctctactgcagaatctccgggcccaggtacctctcctagcggtgaatcttctaccgctccaggtacttctccgagcggtgaatcttctaccgctccaggttctactagctctactgcagaatctcctggcccaggtacctctactccggaaagcggctctgcatctccaggtacttctacccctgaaagcggttctgcatctccaggttctactagcgaatctccttctggcactgcaccaggttctaccagcgaatctccgtctggcactgcaccaggtacctctacccctgaaagcggttccgcttctccaggttctaccagctctaccgcagaatctcctggtccaggtacctctactccggaaagcggctctgcatctccaggttctactagcgaatctccttctggcactgcaccaggtacttctccgagcggtgaatcttctaccgcaccaggttctactagctctaccgctgaatctccgggcccaggtacttctccgagcggtgaatcttctactgctccaggtacctctactcctgaaagcggttctgcatctccaggttccactagctctaccgcagaatctccgggcccaggttctactagctctactgctgaatctcctggcccaggttctactagctctactgctgaatctccgggtccaggttctaccagctctactgctgaatctcctggtccaggtacctccccgagcggtgaatcttctactgcaccaggttctactagcgaatctccttctggcactgcaccaggttctaccagcgaatctccgtctggcactgcaccaggtacctctacccctgaaagcggtccnnnnnnnnnnnntgcaagcgcaagcggcgcgccaagcacgggannnnnnnntagcgaatctccttctggtaccgctccaggttctaccagcgaatccccgtctggtactgctccaggttctaccagcgaatctccttctggtactgcaccaggttctactagcgaatctccttctggtaccgctccaggttctaccagcgaatccccgtctggtactgctccaggttctaccagcgaatctccttctggtactgcaccaggtacttctactccggaaagcggttccgcatctccaggtacttctcctagcggtgaatcttctactgctccaggtacctctcctagcggcgaatcttctactgctccaggttctaccagctctactgctgaatctccgggtccaggtacttccccgagcggtgaatcttctactgcaccaggtacttctactccggaaagcggttccgcttctccaggttctaccagcgaatctccttctggcaccgctccaggttctactagcgaatccccgtctggtaccgcaccaggtacttctcctagcggcgaatcttctaccgcaccaggttctactagcgaatccccgtctggtaccgcaccaggtacttctaccccggaaagcggctctgcttctccaggtacttctaccccggaaagcggctccgcatctccaggttctactagcgaatctccttctggtaccgctccaggtacttctacccctgaaagcggctccgcttctccaggttccactagctctaccgctgaatctccgggtccaggttctaccagcgaatctccttctggcaccgctccaggttctactagcgaatccccgtctggtaccgcaccaggtacttctcctagcggcgaatcttctaccgcaccaggttctaccagctctactgctgaatctccgggtccaggtacttccccgagcggtgaatcttctactgcaccaggtacttctactccggaaagcggttccgcttctccaggtacctcccctagcggcgaatcttctactgctccaggtacctctcctagcggcgaatcttctaccgctccaggtacctcccctagcggtgaatcttctaccgcaccaggttctactagctctactgctgaatctccgggtccaggttctaccagctctactgctgaatctcctggtccaggtacctccccgagcggtgaatcttctactgcaccaggttctagcccttctgcttccaccggtaccggcccaggtagctctactccgtctggtgcaactggctctccaggtagctctactccgtctggtgcaaccggctccccaggttttccgactattccgctgtctcgtctgtttgataatgctatgctgcgtgcgcaccgtctgcaccagctggcctttgatacttaccaggaatttgaagaagcctacattcctaaagagcagaagtactctttcctgcaaaacccacagacttctctctgcttcagcgaatctattccgacgccttccaatcgcgaggaaactcagcaaaagtccaatctggaactactccgcatttctctgcttctgattcagagctggctagaaccagtgcaatttctgcgttccgtcttcgccaatagcctagtttatggcgcatccgacagcaacgtatacgatctcctgaaagatctcgaggaaggcattcagaccctgatgggtcgtctcgaggatggctctccgcgtactggtcagatcttcaagcagacttactctaaatttgatactaacagccacaatgacgatgcgcttctaaaaaactatggtctgctgtattgttttcgtaaagatatggacaaagttgaaaccttcctgcgtattgttcagtgtcgttccgttgagggcagctgtggtttctaaggtggtagcgaaccggcaacttccggctctgaaaccccaggtacttctgaaagcgctactcctgagtctggcccaggtagcgaacctgctacctctggctctgaaaccccaggtagcccggcaggctctccgacttccaccgaggaaggtacctctactgaaccttctgagggtagcgctccaggtagcgaaccggcaacctctggctctgaaaccccaggtagcgaacctgctacctccggctctgaaactccaggtagcgaaccggctacttccggttctgaaactccaggtacctctaccgaaccttccgaaggcagcgcaccaggtacttctgaaagcgcaacccctgaatccggtccaggtagcgaaccggctacttctggctctgagactccaggtacttctaccgaaccgtccgaaggtagcgcacca

SEQ ID NO: 753 - protein, 1201 aa, Artificial Sequence
  Description of Artificial Sequence: Synthetic polypeptide
GASPGTSSTGSPGSSPSASTGTGPGSSPSASTGTGPGTPGSGTASSSPGSSTPSGATGSPGSNPSASTGTGPGASPGTSSTGSPGTPGSGTASSSPGSSTPSGATGSPGTPGSGTASSSPGASPGTSSTGSPGASPGTSSTGSPGTPGSGTASSSPGSSTPSGATGSPGASPGTSSTGSPGTPGSGTASSSPGSSTPSGATGSPGSNPSASTGTGPGSSPSASTGTGPGSSTPSGATGSPGSSTPSGATGSPGASPGTSSTGSPGASPGTSSTGSPGASPGTSSTGSPGTPGSGTASSSPGASPGTSSTGSPGASPGTSSTGSPGASPGTSSTGSPGSSPSASTGTGPGTPGSGTASSSPGASPGTSSTGSPGASPGTSSTGSPGASPGTSSTGSPGSSTPSGATGSPGSSTPSGATGSPGASPGTSSTGSPGTPGSGTASSSPGSSTPSGATGSPGSSTPSGATGSPGSSTPSGATGSPGSSPSASTGTGPGASPGTSSTGSPGASPGTSSTGSPGTPGSGTASSSPGASPGTSSTGSPGASPGTSSTGSPGASPGTSSTGSPGASPGTSSTGSPGTPGSGTASSSPGSSTPSGATGSPGTPGSGTASSSPGSSTPSGATGSPGTPGSGTASSSPGSSTPSGATGSPGSSTPSGATGSPGSSPSASTGTGPGSSPSASTGTGPGASPGTSSTGSPGTPGSGTASSSPGSSTPSGATGSPGSSPSASTGTGPGSSPSASTGTGPGASPGTSSTGSPGASPGTSSTGSPGSSTPSGATGSPGSSPSASTGTGPGASPGTSSTGSPGSSPSASTGTGPGTPGSGTASSSPGSSTPSGATGSPGSSTPSGATGSPGASPGTSSTGSPGFPTIPLSRLFDNAMLRAHRLHQLAFDTYQEFEEAYIPKEQKYSFLQNPQTSLCFSESIPTPSNREETQQKSNLELLRISLLLIQSWLEPVQFLRSVFANSLVYGASDSNVYDLLKDLEEGIQTLMGRLEDGSPRTGQIFKQTYSKFDTNSHNDDALLKNYGLLYCFRKDMDKVETFLRIVQCRSVEGSCGFGGSEPATSGSETPGTSESATPESGPGSEPATSGSETPGSPAGSPTSTEEGTSTEPSEGSAPGSEPATSGSETPGSEPATSGSETPGSEPATSGSETPGTSTEPSEGSAPGTSESATPESGPGSEPATSGSETPGTSTEPSEGSAP

SEQ ID NO: 754 - DNA, 3606 bp, Artificial Sequence
  Description of Artificial Sequence: Synthetic polynucleotide
ggtgcttccccgggcaccagctctactggttctccaggttctagcccgtctgcttctactggtactggtccaggttctagcccttctgcttccactggtactggtccaggtaccccgggtagcggtaccgcttcttcttctccaggtagctctactccgtctggtgctaccggctctccaggttctaacccttctgcatccaccggtaccggcccaggtgcttctccgggcaccagctctactggttctccaggtaccccgggcagcggtaccgcatcttcttctccaggtagctctactccttctggtgcaactggttctccaggtactcctggcagcggtaccgcttcttcttctccaggtgcttctcctggtactagctctactggttctccaggtgcttctccgggcactagctctactggttctccaggtaccccgggtagcggtactgcttcttcctctccaggtagctctaccccttctggtgcaaccggctctccaggtgcttctccgggcaccagctctaccggttctccaggtaccccgggtagcggtaccgcttcttcttctccaggtagctctactccgtctggtgctaccggctctccaggttctaacccttctgcatccaccggtaccggcccaggttctagcccttctgcttccaccggtactggcccaggtagctctaccccttctggtgctaccggctccccaggtagctctactccttctggtgcaactggctctccaggtgcatctccgggcactagctctactggttctccaggtgcatcccctggcactagctctactggttctccaggtgcttctcctggtaccagctctactggttctccaggtactcctggcagcggtaccgcttcttcttctccaggtgcttctcctggtactagctctactggttctccaggtgcttctccgggcactagctctactggttctccaggtgcttccccgggcactagctctaccggttctccaggttctagcccttctgcatctactggtactggcccaggtactccgggcagcggtactgcttcttcctctccaggtgcatctccgggcactagctctactggttctccaggtgcatcccctggcactagctctactggttctccaggtgcttctcctggtaccagctctactggttctccaggtagctctactccgtctggtgcaaccggttccccaggtagctctactccttctggtgctactggctccccaggtgcatcccctggcaccagctctaccggttctccaggtaccccgggcagcggtaccgcatcttcctctccaggtagctctaccccgtctggtgctaccggttccccaggtagctctaccccgtctggtgcaaccggctccccaggtagctctactccgtctggtgcaaccggctccccaggttctagcccgtctgcttccactggtactggcccaggtgcttccccgggcaccagctctactggttctccaggtgcatccccgggtaccagctctaccggttctccaggtactcctggcagcggtactgcatcttcctctccaggtgcttctccgggcaccagctctactggttctccaggtgcatctccgggcactagctctactggttctccaggtgcatcccctggcactagctctactggttctccaggtgcttctcctggtaccagctctactggttctccaggtacccctggtagcggtactgcttcttcctctccaggtagctctactccgtctggtgctaccggttctccaggtaccccgggtagcggtaccgcatcttcttctccaggtagctctaccccgtctggtgctactggttctccaggtactccgggcagcggtactgcttcttcctctccaggtagctctaccccttctggtgctactggctctccaggtagctctaccccgtctggtgctactggctccccaggttctagcccttctgcatccaccggtaccggtccaggttctagcccgtctgcatctactggtactggtccaggtgcatccccgggcactagctctaccggttctccaggtactcctggtagcggtactgcttcttcttctccaggtagctctactccttctggtgctactggttctccaggttctagcccttctgcatccaccggtaccggcccaggttctagcccgtctgcttctaccggtactggtccaggtgcttctccgggtactagctctactggttctccaggtgcatctcctggtactagctctactggttctccaggtagctctactccgtctggtgcaaccggctctccaggttctagcccttctgcatctaccggtactggtccaggtgcatcccctggtaccagctctaccggttctccaggttctagcccttctgcttctaccggtaccggtccaggtacccctggcagcggtaccgcatcttcctctccaggtagctctactccgtctggtgcaaccggttccccaggtagctctactccttctggtgctactggctccccaggtgcatcccctggcaccagctctaccggttctccaggttttccgactattccgctgtctcgtctgtttgataatgctatgctgcgtgcgcaccgtctgcaccagctggcctttgatacttaccaggaatttgaagaagcctacattcctaaagagcagaagtactctttcctgcaaaacccacagacttctctctgcttcagcgaatctattccgacgccttccaatcgcgaggaaactcagcaaaagtccaatctggaactactccgcatttctctgcttctgattcagagctggctagaaccagtgcaatttctgcgttccgtcttcgccaatagcctagtttatggcgcatccgacagcaacgtatacgatctcctgaaagatctcgaggaaggcattcagaccctgatgggtcgtctcgaggatggctctccgcgtactggtcagatcttcaagcagacttactctaaatttgatactaacagccacaatgacgatgcgcttctaaaaaactatggtctgctgtattgttttcgtaaagatatggacaaagttgaaaccttcctgcgtattgttcagtgtcgttccgttgagggcagctgtggtttctaaggtggtagcgaaccggcaacttccggctctgaaaccccaggtacttctgaaagcgctactcctgagtctggcccaggtagcgaacctgctacctctggctctgaaaccccaggtagcccggcaggctctccgacttccaccgaggaaggtacctctactgaaccttctgagggtagcgctccaggtagcgaaccggcaacctctggctctgaaaccccaggtagcgaacctgctacctccggctctgaaactccaggtagcgaaccggctacttccggttctgaaactccaggtacctctaccgaaccttccgaaggcagcgcaccaggtacttctgaaagcgcaacccctgaatccggtccaggtagcgaaccggctacttctggctctgagactccaggtacttctaccgaaccgtccgaaggtagcgcacca

SEQ ID NO: 755 - protein, 1212 aa, Artificial Sequence
  Description of Artificial Sequence: Synthetic polypeptide
GTSTEPSEGSAPGSEPATSGSETPGSPAGSPTSTEEGSTSSTAESPGPGTSTPESGSASPGSTSESPSGTAPGSTSESPSGTAPGTSTPESGSASPGTSTPESGSASPGSEPATSGSETPGTSESATPESGPGSPAGSPTSTEEGTSTEPSEGSAPGTSESATPESGPGTSTEPSEGSAPGTSTEPSEGSAPGSPAGSPTSTEEGTSTEPSEGSAPGTSTEPSEGSAPGTSESATPESGPGTSESATPESGPGTSTEPSEGSAPGTSTEPSEGSAPGTSESATPESGPGTSTEPSEGSAPGSEPATSGSETPGSPAGSPTSTEEGSSTPSGATGSPGTPGSGTASSSPGSSTPSGATGSPGTSTEPSEGSAPGTSTEPSEGSAPGSEPATSGSETPGSPAGSPTSTEEGSPAGSPTSTEEGTSTEPSEGSAPGASASGAPSTGGTSESATPESGPGSPAGSPTSTEEGSPAGSPTSTEEGSTSSTAESPGPGSTSESPSGTAPGTSPSGESSTAPGTPGSGTASSSPGSSTPSGATGSPGSSPSASTGTGPGSEPATSGSETPGTSESATPESGPGSEPATSGSETPGSTSSTAESPGPGSTSSTAESPGPGTSPSGESSTAPGSEPATSGSETPGSEPATSGSETPGTSTEPSEGSAPGSTSSTAESPGPGTSTPESGSASPGSTSESPSGTAPGTSTEPSEGSAPGTSTEPSEGSAPGTSTEPSEGSAPGSSTPSGATGSPGSSPSASTGTGPGASPGTSSTGSPGSEPATSGSETPGTSESATPESGPGSPAGSPTSTEEGSSTPSGATGSPGSSPSASTGTGPGASPGTSSTGSPGTSESATPESGPGTSTEPSEGSAPGTSTEPSEGSAPGFPTIPLSRLFDNAMLRAHRLHQLAFDTYQEFEEAYIPKEQKYSFLQNPQTSLCFSESIPTPSNREETQQKSNLELLRISLLLIQSWLEPVQFLRSVFANSLVYGASDSNVYDLLKDLEEGIQTLMGRLEDGSPRTGQIFKQTYSKFDTNSHNDDALLKNYGLLYCFRKDMDKVETFLRIVQCRSVEGSCGFGGSEPATSGSETPGTSESATPESGPGSEPATSGSETPGSPAGSPTSTEEGTSTEPSEGSAPGSEPATSGSETPGSEPATSGSETPGSEPATSGSETPGTSTEPSEGSAPGTSESATPESGPGSEPATSGSETPGTSTEPSEGSAP

SEQ ID NO: 756 - DNA, 3639 bp, Artificial Sequence
  Description of Artificial Sequence: Synthetic polynucleotide
ggtacttctactgaaccgtctgaaggcagcgcaccaggtagcgaaccggctacttccggttctgaaaccccaggtagcccagcaggttctccaacttctactgaagaaggttctaccagctctaccgcagaatctcctggtccaggtacctctactccggaaagcggctctgcatctccaggttctactagcgaatctccttctggcactgcaccaggttctactagcgaatccccgtctggtactgctccaggtacttctactcctgaaagcggttccgcttctccaggtacctctactccggaaagcggttctgcatctccaggtagcgaaccggcaacctccggctctgaaaccccaggtacctctgaaagcgctactcctgaatccggcccaggtagcccggcaggttctccgacttccactgaggaaggtacctctactgaaccttctgagggcagcgctccaggtacttctgaaagcgctaccccggagtccggtccaggtacttctactgaaccgtccgaaggtagcgcaccaggtacttctaccgaaccgtccgagggtagcgcaccaggtagcccagcaggttctcctacctccaccgaggaaggtacttctaccgaaccgtccgagggtagcgcaccaggtacttctaccgaaccttccgagggcagcgcaccaggtacttctgaaagcgctacccctgagtccggcccaggtacttctgaaagcgctactcctgaatccggtccaggtacctctactgaaccttccgaaggcagcgctccaggtacctctaccgaaccgtccgagggcagcgcaccaggtacttctgaaagcgcaacccctgaatccggtccaggtacttctactgaaccttccgaaggtagcgctccaggtagcgaacctgctacttctggttctgaaaccccaggtagcccggctggctctccgacctccaccgaggaaggtagctctaccccgtctggtgctactggttctccaggtactccgggcagcggtactgcttcttcctctccaggtagctctaccccttctggtgctactggctctccaggtacctctaccgaaccgtccgagggtagcgcaccaggtacctctactgaaccgtctgagggtagcgctccaggtagcgaaccggcaacctccggttctgaaactccaggtagccctgctggctctccgacttctactgaggaaggtagcccggctggttctccgacttctactgaggaaggtacttctaccgaaccttccgaaggtagcgctccaggtgcaagcgcaagcggcgcgccaagcacgggaggtacttctgaaagcgctactcctgagtccggcccaggtagcccggctggctctccgacttccaccgaggaaggtagcccggctggctctccaacttctactgaagaaggttctaccagctctaccgctgaatctcctggcccaggttctactagcgaatctccgtctggcaccgcaccaggtacttcccctagcggtgaatcttctactgcaccaggtacccctggcagcggtaccgcttcttcctctccaggtagctctaccccgtctggtgctactggctctccaggttctagcccgtctgcatctaccggtaccggcccaggtagcgaaccggcaacctccggctctgaaactccaggtacttctgaaagcgctactccggaatccggcccaggtagcgaaccggctacttccggctctgaaaccccaggttccaccagctctactgcagaatctccgggcccaggttctactagctctactgcagaatctccgggtccaggtacttctcctagcggcgaatcttctaccgctccaggtagcgaaccggcaacctctggctctgaaactccaggtagcgaacctgcaacctccggctctgaaaccccaggtacttctactgaaccttctgagggcagcgcaccaggttctaccagctctaccgcagaatctcctggtccaggtacctctactccggaaagcggctctgcatctccaggttctactagcgaatctccttctggcactgcaccaggtacttctaccgaaccgtccgaaggcagcgctccaggtacctctactgaaccttccgagggcagcgctccaggtacctctaccgaaccttctgaaggtagcgcaccaggtagctctactccgtctggtgcaaccggctccccaggttctagcccgtctgcttccactggtactggcccaggtgcttccccgggcaccagctctactggttctccaggtagcgaacctgctacctccggttctgaaaccccaggtacctctgaaagcgcaactccggagtctggtccaggtagccctgcaggttctcctacctccactgaggaaggtagctctactccgtctggtgcaaccggctccccaggttctagcccgtctgcttccactggtactggcccaggtgcttccccgggcaccagctctactggttctccaggtacctctgaaagcgctactccggagtctggcccaggtacctctactgaaccgtctgagggtagcgctccaggtacttctactgaaccgtccgaaggtagcgcaccaggttttccgactattccgctgtctcgtctgtttgataatgctatgctgcgtgcgcaccgtctgcaccagctggcctttgatacttaccaggaatttgaagaagcctacattcctaaagagcagaagtactctttcctgcaaaacccacagacttctctctgcttcagcgaatctattccgacgccttccaatcgcgaggaaactcagcaaaagtccaatctggaactactccgcatttctctgcttctgattcagagctggctagaaccagtgcaatttctgcgttccgtcttcgccaatagcctagtttatggcgcatccgacagcaacgtatacgatctcctgaaagatctcgaggaaggcattcagaccctgatgggtcgtctcgaggatggctctccgcgtactggtcagatcttcaagcagacttactctaaatttgatactaacagccacaatgacgatgcgcttctaaaaaactatggtctgctgtattgttttcgtaaagatatggacaaagttgaaaccttcctgcgtattgttcagtgtcgttccgttgagggcagctgtggtttctaaggtggtagcgaaccggcaacttccggctctgaaaccccaggtacttctgaaagcgctactcctgagtctggcccaggtagcgaacctgctacctctggctctgaaaccccaggtagcccggcaggctctccgacttccaccgaggaaggtacctctactgaaccttctgagggtagcgctccaggtagcgaaccggcaacctctggctctgaaaccccaggtagcgaacctgctacctccggctctgaaactccaggtagcgaaccggctacttccggttctgaaactccaggtacctctaccgaaccttccgaaggcagcgcaccaggtacttctgaaagcgcaacccctgaatccggtccaggtagcgaaccggctacttctggctctgagactccaggtacttctaccgaaccgtccgaaggtagcgcacca

SEQ ID NO: 757 - protein, 1251 aa, Artificial Sequence
  Description of Artificial Sequence: Synthetic polypeptide
MAEPAGSPTSTEEGTPGSGTASSSPGSSTPSGATGSPGASPGTSSTGSPGSPAGSPTSTEEGTSESATPESGPGTSTEPSEGSAPGSPAGSPTSTEEGTSTEPSEGSAPGTSTEPSEGSAPGTSESATPESGPGSEPATSGSETPGSEPATSGSETPGSPAGSPTSTEEGTSESATPESGPGTSTEPSEGSAPGTSTEPSEGSAPGSPAGSPTSTEEGTSTEPSEGSAPGTSTEPSEGSAPGTSESATPESGPGTSTEPSEGSAPGTSESATPESGPGSEPATSGSETPGTSTEPSEGSAPGTSTEPSEGSAPGTSESATPESGPGTSESATPESGPGSPAGSPTSTEEGTSESATPESGPGSEPATSGSETPGTSESATPESGPGTSTEPSEGSAPGTSTEPSEGSAPGTSTEPSEGSAPGTSTEPSEGSAPGTSTEPSEGSAPGTSTEPSEGSAPGSPAGSPTSTEEGTSTEPSEGSAPGTSESATPESGPGSEPATSGSETPGTSESATPESGPGSEPATSGSETPGTSESATPESGPGTSTEPSEGSAPGTSESATPESGPGSPAGSPTSTEEGSPAGSPTSTEEGSPAGSPTSTEEGTSESATPESGPGTSTEPSEGSAPGTSESATPESGPGSEPATSGSETPGTSESATPESGPGSEPATSGSETPGTSESATPESGPGTSTEPSEGSAPGSPAGSPTSTEEGTSESATPESGPGSEPATSGSETPGTSESATPESGPGSPAGSPTSTEEGSPAGSPTSTEEGTSTEPSEGSAPGTSESATPESGPGTSESATPESGPGTSESATPESGPGSEPATSGSETPGSEPATSGSETPGSPAGSPTSTEEGTSTEPSEGSAPGTSTEPSEGSAPGSEPATSGSETPGTSESATPESGPGTSTEPSEGSAPGFPTIPLSRLFDNAMLRAHRLHQLAFDTYQEFEEAYIPKEQKYSFLQNPQTSLCFSESIPTPSNREETQQKSNLELLRISLLLIQSWLEPVQFLRSVFANSLVYGASDSNVYDLLKDLEEGIQTLMGRLEDGSPRTGQIFKQTYSKFDTNSHNDDALLKNYGLLYCFRKDMDKVETFLRIVQCRSVEGSCGFGGTSESATPESGPGTSTEPSEGSAPGTSTEPSEGSAPGTSESATPESGPGTSTEPSEGSAPGTSTEPSEGSAPGTSESATPESGPGTSTEPSEGSAPGTSTEPSEGSAPGTSTEPSEGSAPGSPAGSPTSTEEGTSTEPSEGSAPG

SEQ ID NO: 758 - DNA, 3753 bp, Artificial Sequence
  Description of Artificial Sequence: Synthetic polynucleotide
atggctgaacctgctggctctccaacctccactgaggaaggtaccccgggtagcggtactgcttcttcctctccaggtagctctaccccttctggtgcaaccggctctccaggtgcttctccgggcaccagctctaccggttctccaggtagcccggctggctctcctacctctactgaggaaggtacttctgaaagcgctactcctgagtctggtccaggtacctctactgaaccgtccgaaggtagcgctccaggtagcccagcaggctctccgacttccactgaggaaggtacttctactgaaccttccgaaggcagcgcaccaggtacctctactgaaccttctgagggcagcgctccaggtacttctgaaagcgctaccccggaatctggcccaggtagcgaaccggctacttctggttctgaaaccccaggtagcgaaccggctacctccggttctgaaactccaggtagcccggcaggctctccgacctctactgaggaaggtacttctgaaagcgcaaccccggagtccggcccaggtacctctaccgaaccgtctgagggcagcgcaccaggtacttctaccgaaccgtccgagggtagcgcaccaggtagcccagcaggttctcctacctccaccgaggaaggtacttctaccgaaccgtccgagggtagcgcaccaggtacctctactgaaccttctgagggcagcgctccaggtacttctgaaagcgctaccccggagtccggtccaggtacttctactgaaccgtccgaaggtagcgcaccaggtacttctgaaagcgcaacccctgaatccggtccaggtagcgaaccggctacttctggctctgagactccaggtacttctaccgaaccgtccgaaggtagcgcaccaggtacttctactgaaccgtctgaaggtagcgcaccaggtacttctgaaagcgcaaccccggaatccggcccaggtacctctgaaagcgcaaccccggagtccggcccaggtagccctgctggctctccaacctccaccgaagaaggtacctctgaaagcgcaacccctgaatccggcccaggtagcgaaccggcaacctccggttctgaaaccccaggtacctctgaaagcgctactccggagtctggcccaggtacctctactgaaccgtctgagggtagcgctccaggtacttctactgaaccgtccgaaggtagcgcaccaggtacttctaccgaaccgtccgaaggcagcgctccaggtacctctactgaaccttccgagggcagcgctccaggtacctctaccgaaccttctgaaggtagcgcaccaggtacttctaccgaaccgtccgagggtagcgcaccaggtagcccagcaggttctcctacctccaccgaggaaggtacttctaccgaaccgtccgagggtagcgcaccaggtacctctgaaagcgcaactcctgagtctggcccaggtagcgaacctgctacctccggctctgagactccaggtacctctgaaagcgcaaccccggaatctggtccaggtagcgaacctgcaacctctggctctgaaaccccaggtacctctgaaagcgctactcctgaatctggcccaggtacttctactgaaccgtccgagggcagcgcaccaggtacttctgaaagcgctactcctgagtccggcccaggtagcccggctggctctccgacttccaccgaggaaggtagcccggctggctctccaacttctactgaagaaggtagcccggcaggctctccgacctctactgaggaaggtacttctgaaagcgcaaccccggagtccggcccaggtacctctaccgaaccgtctgagggcagcgcaccaggtacctctgaaagcgcaactcctgagtctggcccaggtagcgaacctgctacctccggctctgagactccaggtacctctgaaagcgcaaccccggaatctggtccaggtagcgaacctgcaacctctggctctgaaaccccaggtacctctgaaagcgctactcctgaatctggcccaggtacttctactgaaccgtccgagggcagcgcaccaggtagccctgctggctctccaacctccaccgaagaaggtacctctgaaagcgcaacccctgaatccggcccaggtagcgaaccggcaacctccggttctgaaaccccaggtacttctgaaagcgctactcctgagtccggcccaggtagcccggctggctctccgacttccaccgaggaaggtagcccggctggctctccaacttctactgaagaaggtacttctaccgaaccttccgagggcagcgcaccaggtacttctgaaagcgctacccctgagtccggcccaggtacttctgaaagcgctactcctgaatccggtccaggtacttctgaaagcgctaccccggaatctggcccaggtagcgaaccggctacttctggttctgaaaccccaggtagcgaaccggctacctccggttctgaaactccaggtagcccagcaggctctccgacttccactgaggaaggtacttctactgaaccttccgaaggcagcgcaccaggtacctctactgaaccttctgagggcagcgctccaggtagcgaacctgcaacctctggctctgaaaccccaggtacctctgaaagcgctactcctgaatctggcccaggtacttctactgaaccgtccgagggcagcgcaccaggttttccgactattccgctgtctcgtctgtttgataatgctatgctgcgtgcgcaccgtctgcaccagctggcctttgatacttaccaggaatttgaagaagcctacattcctaaagagcagaagtactctttcctgcaaaacccacagacttctctctgcttcagcgaatctattccgacgccttccaatcgcgaggaaactcagcaaaagtccaatctggaactactccgcatttctctgcttctgattcagagctggctagaaccagtgcaatttctgcgttccgtcttcgccaatagcctagtttatggcgcatccgacagcaacgtatacgatctcctgaaagatctcgaggaaggcattcagaccctgatgggtcgtctcgaggatggctctccgcgtactggtcagatcttcaagcagacttactctaaatttgatactaacagccacaatgacgatgcgcttctaaaaaactatggtctgctgtattgttttcgtaaagatatggacaaagttgaaaccttcctgcgtattgttcagtgtcgttccgttgagggcagctgtggtttctaaggtggtagcgaaccggcaacttccggctctgaaaccccaggtacttctgaaagcgctactcctgagtctggcccaggtagcgaacctgctacctctggctctgaaaccccaggtagcccggcaggctctccgacttccaccgaggaaggtacctctactgaaccttctgagggtagcgctccaggtagcgaaccggcaacctctggctctgaaaccccaggtagcgaacctgctacctccggctctgaaactccaggtagcgaaccggctacttccggttctgaaactccaggtacctctaccgaaccttccgaaggcagcgcaccaggtacttctgaaagcgcaacccctgaatccggtccaggtagcgaaccggctacttctggctctgagactccaggtacttctaccgaaccgtccgaaggtagcgcacca

SEQ ID NO: 759 - protein, 1261 aa, Artificial Sequence
  Description of Artificial Sequence: Synthetic polypeptide
MAEPAGSPTSTEEGASPGTSSTGSPGSSTPSGATGSPGSSTPSGATGSPGTSTEPSEGSAPGSEPATSGSETPGSPAGSPTSTEEGSTSSTAESPGPGTSTPESGSASPGSTSESPSGTAPGSTSESPSGTAPGTSTPESGSASPGTSTPESGSASPGSEPATSGSETPGTSESATPESGPGSPAGSPTSTEEGTSTEPSEGSAPGTSESATPESGPGTSTEPSEGSAPGTSTEPSEGSAPGSPAGSPTSTEEGTSTEPSEGSAPGTSTEPSEGSAPGTSESATPESGPGTSESATPESGPGTSTEPSEGSAPGTSTEPSEGSAPGTSESATPESGPGTSTEPSEGSAPGSEPATSGSETPGSPAGSPTSTEEGSSTPSGATGSPGTPGSGTASSSPGSSTPSGATGSPGTSTEPSEGSAPGTSTEPSEGSAPGSEPATSGSETPGSPAGSPTSTEEGSPAGSPTSTEEGTSTEPSEGSAPGASASGAPSTGGTSESATPESGPGSPAGSPTSTEEGSPAGSPTSTEEGSTSSTAESPGPGSTSESPSGTAPGTSPSGESSTAPGTPGSGTASSSPGSSTPSGATGSPGSSPSASTGTGPGSEPATSGSETPGTSESATPESGPGSEPATSGSETPGSTSSTAESPGPGSTSSTAESPGPGTSPSGESSTAPGSEPATSGSETPGSEPATSGSETPGTSTEPSEGSAPGSTSSTAESPGPGTSTPESGSASPGSTSESPSGTAPGTSTEPSEGSAPGTSTEPSEGSAPGTSTEPSEGSAPGSSTPSGATGSPGSSPSASTGTGPGASPGTSSTGSPGSEPATSGSETPGTSESATPESGPGSPAGSPTSTEEGSSTPSGATGSPGSSPSASTGTGPGASPGTSSTGSPGTSESATPESGPGTSTEPSEGSAPGTSTEPSEGSAPGFPTIPLSRLFDNAMLRAHRLHQLAFDTYQEFEEAYIPKEQKYSFLQNPQTSLCFSESIPTPSNREETQQKSNLELLRISLLLIQSWLEPVQFLRSVFANSLVYGASDSNVYDLLKDLEEGIQTLMGRLEDGSPRTGQIFKQTYSKFDTNSHNDDALLKNYGLLYCFRKDMDKVETFLRIVQCRSVEGSCGFGGSEPATSGSETPGTSESATPESGPGSEPATSGSETPGSPAGSPTSTEEGTSTEPSEGSAPGSEPATSGSETPGSEPATSGSETPGSEPATSGSETPGTSTEPSEGSAPGTSESATPESGPGSEPATSGSETPGTSTEPSEGSAP

SEQ ID NO: 760 - DNA, 3756 bp, Artificial Sequence
  Description of Artificial Sequence: Synthetic polynucleotide
atggctgaacctgctggctctccaacctccactgaggaaggtaccccgggtagcggtactgcttcttcctctccaggtagctctaccccttctggtgcaaccggctctccaggtgcttctccgggcaccagctctaccggttctccaggtagcccggctggctctcctacctctactgaggaaggtacttctgaaagcgctactcctgagtctggtccaggtacctctactgaaccgtccgaaggtagcgctccaggtagcccagcaggctctccgacttccactgaggaaggtacttctactgaaccttccgaaggcagcgcaccaggtacctctactgaaccttctgagggcagcgctccaggtacttctgaaagcgctaccccggaatctggcccaggtagcgaaccggctacttctggttctgaaaccccaggtagcgaaccggctacctccggttctgaaactccaggtagcccggcaggctctccgacctctactgaggaaggtacttctgaaagcgcaaccccggagtccggcccaggtacctctaccgaaccgtctgagggcagcgcaccaggtacttctaccgaaccgtccgagggtagcgcaccaggtagcccagcaggttctcctacctccaccgaggaaggtacttctaccgaaccgtccgagggtagcgcaccaggtacctctactgaaccttctgagggcagcgctccaggtacttctgaaagcgctaccccggagtccggtccaggtacttctactgaaccgtccgaaggtagcgcaccaggtacttctgaaagcgcaacccctgaatccggtccaggtagcgaaccggctacttctggctctgagactccaggtacttctaccgaaccgtccgaaggtagcgcaccaggtacttctactgaaccgtctgaaggtagcgcaccaggtacttctgaaagcgcaaccccggaatccggcccaggtacctctgaaagcgcaaccccggagtccggcccaggtagccctgctggctctccaacctccaccgaagaaggtacctctgaaagcgcaacccctgaatccggcccaggtagcgaaccggcaacctccggttctgaaaccccaggtacctctgaaagcgctactccggagtctggcccaggtacctctactgaaccgtctgagggtagcgctccaggtacttctactgaaccgtccgaaggtagcgcaccaggtacttctaccgaaccgtccgaaggcagcgctccaggtacctctactgaaccttccgagggcagcgctccaggtacctctaccgaaccttctgaaggtagcgcaccaggtacttctaccgaaccgtccgagggtagcgcaccaggtagcccagcaggttctcctacctccaccgaggaaggtacttctaccgaaccgtccgagggtagcgcaccaggtacctctgaaagcgcaactcctgagtctggcccaggtagcgaacctgctacctccggctctgagactccaggtacctctgaaagcgcaaccccggaatctggtccaggtagcgaacctgcaacctctggctctgaaaccccaggtacctctgaaagcgctactcctgaatctggcccaggtacttctactgaaccgtccgagggcagcgcaccaggtacttctgaaagcgctactcctgagtccggcccaggtagcccggctggctctccgacttccaccgaggaaggtagcccggctggctctccaacttctactgaagaaggtagcccggcaggctctccgacctctactgaggaaggtacttctgaaagcgcaaccccggagtccggcccaggtacctctaccgaaccgtctgagggcagcgcaccaggtacctctgaaagcgcaactcctgagtctggcccaggtagcgaacctgctacctccggctctgagactccaggtacctctgaaagcgcaaccccggaatctggtccaggtagcgaacctgcaacctctggctctgaaaccccaggtacctctgaaagcgctactcctgaatctggcccaggtacttctactgaaccgtccgagggcagcgcaccaggtagccctgctggctctccaacctccaccgaagaaggtacctctgaaagcgcaacccctgaatccggcccaggtagcgaaccggcaacctccggttctgaaaccccaggtacttctgaaagcgctactcctgagtccggcccaggtagcccggctggctctccgacttccaccgaggaaggtagcccggctggctctccaacttctactgaagaaggtacttctaccgaaccttccgagggcagcgcaccaggtacttctgaaagcgctacccctgagtccggcccaggtacttctgaaagcgctactcctgaatccggtccaggtacttctgaaagcgctaccccggaatctggcccaggtagcgaaccggctacttctggttctgaaaccccaggtagcgaaccggctacctccggttctgaaactccaggtagcccagcaggctctccgacttccactgaggaaggtacttctactgaaccttccgaaggcagcgcaccaggtacctctactgaaccttctgagggcagcgctccaggtagcgaacctgcaacctctggctctgaaaccccaggtacctctgaaagcgctactcctgaatctggcccaggtacttctactgaaccgtccgagggcagcgcaccaggttttccgactattccgctgtctcgtctgtttgataatgctatgctgcgtgcgcaccgtctgcaccagctggcctttgatacttaccaggaatttgaagaagcctacattcctaaagagcagaagtactctttcctgcaaaacccacagacttctctctgcttcagcgaatctattccgacgccttccaatcgcgaggaaactcagcaaaagtccaatctggaactactccgcatttctctgcttctgattcagagctggctagaaccagtgcaatttctgcgttccgtgttcgccaatagcctagtttatggcgcatccgacagcaacgtatacgatctcctgaaagatctcgaggaaggcattcagaccctgatgggtcgtctcgaggatggctctccgcgtactggtcagatcttcaagcagacttactctaaatttgatactaacagccacaatgacgatgcgcttctaaaaaactatggtctgctgtattgttttcgtaaagatatggacaaagttgaaaccttcctgcgtattgttcagtgtcgttccgttgagggcagctgtggtttcggaggtacttctgaaagcgctactccggagtccggtccaggtacctctaccgaaccgtccgaaggcagcgctccaggtacttctactgaaccttctgagggtagcgctccaggtacttctgaaagcgctactccggagtccggtccaggtacctctaccgaaccgtccgaaggcagcgctccaggtacttctactgaaccttctgagggtagcgctccaggtacctctgaaagcgctactccggagtctggcccaggtacctctactgaaccgtctgagggtagcgctccaggtacttctactgaaccgtccgaaggtagcgcaccaggtacttctaccgaaccgtccgagggtagcgcaccaggtagcccagcaggttctcctacctccaccgaggaaggtacttctaccgaaccgtccgagggtagcgcaccaggttaa

SEQ ID NO: 761 - protein, 1655 aa, Artificial Sequence
  Description of Artificial Sequence: Synthetic polypeptide
GTSTEPSEGSAPGSEPATSGSETPGSPAGSPTSTEEGSTSSTAESPGPGTSTPESGSASPGSTSESPSGTAPGSTSESPSGTAPGTSTPESGSASPGTSTPESGSASPGSEPATSGSETPGTSESATPESGPGSPAGSPTSTEEGTSTEPSEGSAPGTSESATPESGPGTSTEPSEGSAPGTSTEPSEGSAPGSPAGSPTSTEEGTSTEPSEGSAPGTSTEPSEGSAPGTSESATPESGPGTSESATPESGPGTSTEPSEGSAPGTSTEPSEGSAPGTSESATPESGPGTSTEPSEGSAPGSEPATSGSETPGSPAGSPTSTEEGSSTPSGATGSPGTPGSGTASSSPGSSTPSGATGSPGTSTEPSEGSAPGTSTEPSEGSAPGSEPATSGSETPGSPAGSPTSTEEGSPAGSPTSTEEGTSTEPSEGSAPGPEPTGPAPSGGSEPATSGSETPGTSESATPESGPGSPAGSPTSTEEGTSESATPESGPGSPAGSPTSTEEGSPAGSPTSTEEGTSESATPESGPGSPAGSPTSTEEGSPAGSPTSTEEGSTSSTAESPGPGSTSESPSGTAPGTSPSGESSTAPGSTSESPSGTAPGSTSESPSGTAPGTSPSGESSTAPGTSTEPSEGSAPGTSESATPESGPGTSESATPESGPGSEPATSGSETPGTSESATPESGPGTSESATPESGPGTSTEPSEGSAPGTSESATPESGPGTSTEPSEGSAPGTSPSGESSTAPGTSPSGESSTAPGTSPSGESSTAPGTSTEPSEGSAPGSPAGSPTSTEEGTSTEPSEGSAPGSSPSASTGTGPGSSTPSGATGSPGSSTPSGATGSPGSSTPSGATGSPGSSTPSGATGSPGASPGTSSTGSPGASASGAPSTGGTSPSGESSTAPGSTSSTAESPGPGTSPSGESSTAPGTSESATPESGPGTSTEPSEGSAPGTSTEPSEGSAPGSSPSASTGTGPGSSTPSGATGSPGASPGTSSTGSPGTSTPESGSASPGTSPSGESSTAPGTSPSGESSTAPGTSESATPESGPGSEPATSGSETPGTSTEPSEGSAPGSTSESPSGTAPGSTSESPSGTAPGTSTPESGSASPGSPAGSPTSTEEGTSESATPESGPGTSTEPSEGSAPGSPAGSPTSTEEGTSESATPESGPGSEPATSGSETPGSSTPSGATGSPGASPGTSSTGSPGSSTPSGATGSPGSTSESPSGTAPGTSPSGESSTAPGSTSSTAESPGPGSSTPSGATGSPGASPGTSSTGSPGTPGSGTASSSPGSPAGSPTSTEEGSPAGSPTSTEEGTSTEPSEGSAPGFPTIPLSRLFDNAMLRAHRLHQLAFDTYQEFEEAYIPKEQKYSFLQNPQTSLCFSESIPTPSNREETQQKSNLELLRISLLLIQSWLEPVQFLRSVFANSLVYGASDSNVYDLLKDLEEGIQTLMGRLEDGSPRTGQIFKQTYSKFDTNSHNDDALLKNYGLLYCFRKDMDKVETFLRIVQCRSVEGSCGFGGSEPATSGSETPGTSESATPESGPGSEPATSGSETPGSPAGSPTSTEEGTSTEPSEGSAPGSEPATSGSETPGSEPATSGSETPGSEPATSGSETPGTSTEPSEGSAPGTSESATPESGPGSEPATSGSETPGTSTEPSEGSAP

SEQ ID NO: 762 - DNA, 4968 bp, Artificial Sequence
  Description of Artificial Sequence: Synthetic polynucleotide
ggtacttctactgaaccgtctgaaggcagcgcaccaggtagcgaaccggctacttccggttctgaaaccccaggtagcccagcaggttctccaacttctactgaagaaggttctaccagctctaccgcagaatctcctggtccaggtacctctactccggaaagcggctctgcatctccaggttctactagcgaatctccttctggcactgcaccaggttctactagcgaatccccgtctggtactgctccaggtacttctactcctgaaagcggttccgcttctccaggtacctctactccggaaagcggttctgcatctccaggtagcgaaccggcaacctccggctctgaaaccccaggtacctctgaaagcgctactcctgaatccggcccaggtagcccggcaggttctccgacttccactgaggaaggtacctctactgaaccttctgagggcagcgctccaggtacttctgaaagcgctaccccggagtccggtccaggtacttctactgaaccgtccgaaggtagcgcaccaggtacttctaccgaaccgtccgagggtagcgcaccaggtagcccagcaggttctcctacctccaccgaggaaggtacttctaccgaaccgtccgagggtagcgcaccaggtacttctaccgaaccttccgagggcagcgcaccaggtacttctgaaagcgctacccctgagtccggcccaggtacttctgaaagcgctactcctgaatccggtccaggtacctctactgaaccttccgaaggcagcgctccaggtacctctaccgaaccgtccgagggcagcgcaccaggtacttctgaaagcgcaacccctgaatccggtccaggtacttctactgaaccttccgaaggtagcgctccaggtagcgaacctgctacttctggttctgaaaccccaggtagcccggctggctctccgacctccaccgaggaaggtagctctaccccgtctggtgctactggttctccaggtactccgggcagcggtactgcttcttcctctccaggtagctctaccccttctggtgctactggctctccaggtacctctaccgaaccgtccgagggtagcgcaccaggtacctctactgaaccgtctgagggtagcgctccaggtagcgaaccggcaacctccggttctgaaactccaggtagccctgctggctctccgacttctactgaggaaggtagcccggctggttctccgacttctactgaggaaggtacttctaccgaaccttccgaaggtagcgctccaggtccagaaccaacggggccggccccaagcggaggtagcgaaccggcaacctccggctctgaaaccccaggtacctctgaaagcgctactcctgaatccggcccaggtagcccggcaggttctccgacttccactgaggaaggtacttctgaaagcgctactcctgagtccggcccaggtagcccggctggctctccgacttccaccgaggaaggtagcccggctggctctccaacttctactgaagaaggtacttctgaaagcgctactcctgagtccggcccaggtagcccggctggctctccgacttccaccgaggaaggtagcccggctggctctccaacttctactgaagaaggttctaccagctctaccgctgaatctcctggcccaggttctactagcgaatctccgtctggcaccgcaccaggtacttcccctagcggtgaatcttctactgcaccaggttctaccagcgaatctccttctggcaccgctccaggttctactagcgaatccccgtctggtaccgcaccaggtacttctcctagcggcgaatcttctaccgcaccaggtacttctaccgaaccttccgagggcagcgcaccaggtacttctgaaagcgctacccctgagtccggcccaggtacttctgaaagcgctactcctgaatccggtccaggtagcgaaccggcaacctctggctctgaaaccccaggtacctctgaaagcgctactccggaatctggtccaggtacttctgaaagcgctactccggaatccggtccaggtacctctactgaaccttctgagggcagcgctccaggtacttctgaaagcgctaccccggagtccggtccaggtacttctactgaaccgtccgaaggtagcgcaccaggtacctcccctagcggcgaatcttctactgctccaggtacctctcctagcggcgaatcttctaccgctccaggtacctcccctagcggtgaatcttctaccgcaccaggtacttctaccgaaccgtccgagggtagcgcaccaggtagcccagcaggttctcctacctccaccgaggaaggtacttctaccgaaccgtccgagggtagcgcaccaggttctagcccttctgcttccaccggtaccggcccaggtagctctactccgtctggtgcaactggctctccaggtagctctactccgtctggtgcaaccggctccccaggtagctctaccccgtctggtgctaccggctctccaggtagctctaccccgtctggtgcaaccggctccccaggtgcatccccgggtactagctctaccggttctccaggtgcaagcgcaagcggcgcgccaagcacgggaggtacttctccgagcggtgaatcttctaccgcaccaggttctactagctctaccgctgaatctccgggcccaggtacttctccgagcggtgaatcttctactgctccaggtacctctgaaagcgctactccggagtctggcccaggtacctctactgaaccgtctgagggtagcgctccaggtacttctactgaaccgtccgaaggtagcgcaccaggttctagcccttctgcatctactggtactggcccaggtagctctactccttctggtgctaccggctctccaggtgcttctccgggtactagctctaccggttctccaggtacttctactccggaaagcggttccgcatctccaggtacttctcctagcggtgaatcttctactgctccaggtacctctcctagcggcgaatcttctactgctccaggtacttctgaaagcgcaacccctgaatccggtccaggtagcgaaccggctacttctggctctgagactccaggtacttctaccgaaccgtccgaaggtagcgcaccaggttctaccagcgaatccccttctggtactgctccaggttctaccagcgaatccccttctggcaccgcaccaggtacttctacccctgaaagcggctccgcttctccaggtagcccggcaggctctccgacctctactgaggaaggtacttctgaaagcgcaaccccggagtccggcccaggtacctctaccgaaccgtctgagggcagcgcaccaggtagccctgctggctctccaacctccaccgaagaaggtacctctgaaagcgcaacccctgaatccggcccaggtagcgaaccggcaacctccggttctgaaaccccaggtagctctaccccgtctggtgctaccggttccccaggtgcttctcctggtactagctctaccggttctccaggtagctctaccccgtctggtgctactggctctccaggttctactagcgaatccccgtctggtactgctccaggtacttcccctagcggtgaatcttctactgctccaggttctaccagctctaccgcagaatctccgggtccaggtagctctaccccttctggtgcaaccggctctccaggtgcatccccgggtaccagctctaccggttctccaggtactccgggtagcggtaccgcttcttcctctccaggtagccctgctggctctccgacttctactgaggaaggtagcccggctggttctccgacttctactgaggaaggtacttctaccgaaccttccgaaggtagcgctccaggttttccgactattccgctgtctcgtctgtttgataatgctatgctgcgtgcgcaccgtctgcaccagctggcctttgatacttaccaggaatttgaagaagcctacattcctaaagagcagaagtactctttcctgcaaaacccacagacttctctctgcttcagcgaatctattccgacgccttccaatcgcgaggaaactcagcaaaagtccaatctggaactactccgcatttctctgcttctgattcagagctggctagaaccagtgcaatttctgcgttccgtcttcgccaatagcctagtttatggcgcatccgacagcaacgtatacgatctcctgaaagatctcgaggaaggcattcagaccctgatgggtcgtctcgaggatggctctccgcgtactggtcagatcttcaagcagacttactctaaatttgatactaacagccacaatgacgatgcgcttctaaaaaactatggtctgctgtattgttttcgtaaagatatggacaaagttgaaaccttcctgcgtattgttcagtgtcgttccgttgagggcagctgtggtttctaaggtggtagcgaaccggcaacttccggctctgaaaccccaggtacttctgaaagcgctactcctgagtctggcccaggtagcgaacctgctacctctggctctgaaaccccaggtagcccggcaggctctccgacttccaccgaggaaggtacctctactgaaccttctgagggtagcgctccaggtagcgaaccggcaacctctggctctgaaaccccaggtagcgaacctgctacctccggctctgaaactccaggtagcgaaccggctacttccggttctgaaactccaggtacctctaccgaaccttccgaaggcagcgcaccaggtacttctgaaagcgcaacccctgaatccggtccaggtagcgaaccggctacttctggctctgagactccaggtacttctaccgaaccgtccgaaggtagcgcacca

SEQ ID NO: 763 - protein, 530 aa, Artificial Sequence
  Description of Artificial Sequence: Synthetic polypeptide
MAEPAGSPTSTEEGTPGSGTASSSPGSSTPSGATGSPGASPGTSSTGSPGFPTIPLSRLFDNAMLRAHRLHQLAFDTYQEFEEAYIPKEQKYSFLQNPQTSLCFSESIPTPSNREETQQKSNLELLRISLLLIQSWLEPVQFLRSVFANSLVYGASDSNVYDLLKDLEEGIQTLMGRLEDGSPRTGQIFKQTYSKFDTNSHNDDALLKNYGLLYCFRKDMDKVETFLRIVQCRSVEGSCGFGGTSESATPESGPGSEPATSGSETPGTSESATPESGPGSEPATSGSETPGTSESATPESGPGTSTEPSEGSAPGSPAGSPTSTEEGTSESATPESGPGSEPATSGSETPGTSESATPESGPGSPAGSPTSTEEGSPAGSPTSTEEGTSTEPSEGSAPGTSESATPESGPGTSESATPESGPGTSESATPESGPGSEPATSGSETPGSEPATSGSETPGSPAGSPTSTEEGTSTEPSEGSAPGTSTEPSEGSAPGSEPATSGSETPGTSESATPESGPGTSTEPSEGSAP

SEQ ID NO: 764 - DNA, 1593 bp, Artificial Sequence
  Description of Artificial Sequence: Synthetic polynucleotide
atggctgaacctgctggctctccaacctccactgaggaaggtaccccgggtagcggtactgcttcttcctctccaggtagctctaccccttctggtgcaaccggctctccaggtgcttctccgggcaccagctctaccggttctccaggttttccgactattccgctgtctcgtctgtttgataatgctatgctgcgtgcgcaccgtctgcaccagctggcctttgatacttaccaggaatttgaagaagcctacattcctaaagagcagaagtactctttcctgcaaaacccacagacttctctctgcttcagcgaatctattccgacgccttccaatcgcgaggaaactcagcaaaagtccaatctggaactactccgcatttctctgcttctgattcagagctggctagaaccagtgcaatttctgcgttccgtcttcgccaatagcctagtttatggcgcatccgacagcaacgtatacgatctcctgaaagatctcgaggaaggcattcagaccctgatgggtcgtctcgaggatggctctccgcgtactggtcagatcttcaagcagacttactctaaatttgatactaacagccacaatgacgatgcgcttctaaaaaactatggtctgctgtattgttttcgtaaagatatggacaaagttgaaaccttcctgcgtattgttcagtgtcgttccgttgagggcagctgtggtttctaaggtggtacctctgaaagcgcaactcctgagtctggcccaggtagcgaacctgctacctccggctctgagactccaggtacctctgaaagcgcaaccccggaatctggtccaggtagcgaacctgcaacctctggctctgaaaccccaggtacctctgaaagcgctactcctgaatctggcccaggtacttctactgaaccgtccgagggcagcgcaccaggtagccctgctggctctccaacctccaccgaagaaggtacctctgaaagcgcaacccctgaatccggcccaggtagcgaaccggcaacctccggttctgaaaccccaggtacttctgaaagcgctactcctgagtccggcccaggtagcccggctggctctccgacttccaccgaggaaggtagcccggctggctctccaacttctactgaagaaggtacttctaccgaaccttccgagggcagcgcaccaggtacttctgaaagcgctacccctgagtccggcccaggtacttctgaaagcgctactcctgaatccggtccaggtacttctgaaagcgctaccccggaatctggcccaggtagcgaaccggctacttctggttctgaaaccccaggtagcgaaccggctacctccggttctgaaactccaggtagcccagcaggctctccgacttccactgaggaaggtacttctactgaaccttccgaaggcagcgcaccaggtacctctactgaaccttctgagggcagcgctccaggtagcgaacctgcaacctctggctctgaaaccccaggtacctctgaaagcgctactcctgaatctggcccaggtacttctactgaaccgtccgagggcagcgcacca

SEQ ID NO: 765 - protein, 530 aa, Artificial Sequence
  Description of Artificial Sequence: Synthetic polypeptide
MAEPAGSPTSTEEGASPGTSSTGSPGSSTPSGATGSPGSSTPSGATGSPGFPTIPLSRLFDNAMLRAHRLHQLAFDTYQEFEEAYIPKEQKYSFLQNPQTSLCFSESIPTPSNREETQQKSNLELLRISLLLIQSWLEPVQFLRSVFANSLVYGASDSNVYDLLKDLEEGIQTLMGRLEDGSPRTGQIFKQTYSKFDTNSHNDDALLKNYGLLYCFRKDMDKVETFLRIVQCRSVEGSCGFGGTSESATPESGPGSEPATSGSETPGTSESATPESGPGSEPATSGSETPGTSESATPESGPGTSTEPSEGSAPGSPAGSPTSTEEGTSESATPESGPGSEPATSGSETPGTSESATPESGPGSPAGSPTSTEEGSPAGSPTSTEEGTSTEPSEGSAPGTSESATPESGPGTSESATPESGPGTSESATPESGPGSEPATSGSETPGSEPATSGSETPGSPAGSPTSTEEGTSTEPSEGSAPGTSTEPSEGSAPGSEPATSGSETPGTSESATPESGPGTSTEPSEGSAP

SEQ ID NO: 766 - DNA, 1593 bp, Artificial Sequence
  Description of Artificial Sequence: Synthetic polynucleotide
atggctgaacctgctggctctccaacctccactgaggaaggtgcatccccgggcaccagctctaccggttctccaggtagctctaccccgtctggtgctaccggctctccaggtagctctaccccgtctggtgctactggctctccaggttttccgactattccgctgtctcgtctgtttgataatgctatgctgcgtgcgcaccgtctgcaccagctggcctttgatacttaccaggaatttgaagaagcctacattcctaaagagcagaagtactctttcctgcaaaacccacagacttctctctgcttcagcgaatctattccgacgccttccaatcgcgaggaaactcagcaaaagtccaatctggaactactccgcatttctctgcttctgattcagagctggctagaaccagtgcaatttctgcgttccgtcttcgccaatagcctagtttatggcgcatccgacagcaacgtatacgatctcctgaaagatctcgaggaaggcattcagaccctgatgggtcgtctcgaggatggctctccgcgtactggtcagatcttcaagcagacttactctaaatttgatactaacagccacaatgacgatgcgcttctaaaaaactatggtctgctgtattgttttcgtaaagatatggacaaagttgaaaccttcctgcgtattgttcagtgtcgttccgttgagggcagctgtggtttctaaggtggtacctctgaaagcgcaactcctgagtctggcccaggtagcgaacctgctacctccggctctgagactccaggtacctctgaaagcgcaaccccggaatctggtccaggtagcgaacctgcaacctctggctctgaaaccccaggtacctctgaaagcgctactcctgaatctggcccaggtacttctactgaaccgtccgagggcagcgcaccaggtagccctgctggctctccaacctccaccgaagaaggtacctctgaaagcgcaacccctgaatccggcccaggtagcgaaccggcaacctccggttctgaaaccccaggtacttctgaaagcgctactcctgagtccggcccaggtagcccggctggctctccgacttccaccgaggaaggtagcccggctggctctccaacttctactgaagaaggtacttctaccgaaccttccgagggcagcgcaccaggtacttctgaaagcgctacccctgagtccggcccaggtacttctgaaagcgctactcctgaatccggtccaggtacttctgaaagcgctaccccggaatctggcccaggtagcgaaccggctacttctggttctgaaaccccaggtagcgaaccggctacctccggttctgaaactccaggtagcccagcaggctctccgacttccactgaggaaggtacttctactgaaccttccgaaggcagcgcaccaggtacctctactgaaccttctgagggcagcgctccaggtagcgaacctgcaacctctggctctgaaaccccaggtacctctgaaagcgctactcctgaatctggcccaggtacttctactgaaccgtccgagggcagcgcacca

SEQ ID NO: 767 - protein, 625 aa, Artificial Sequence
  Description of Artificial Sequence: Synthetic polypeptide
GSEPATSGSETPGTSESATPESGPGSEPATSGSETPGSPAGSPTSTEEGTSTEPSEGSAPGSEPATSGSETPGSEPATSGSETPGSEPATSGSETPGTSTEPSEGSAPGTSESATPESGPGSEPATSGSETPGTSTEPSEGSAPGFPTIPLSRLFDNAMLRAHRLHQLAFDTYQEFEEAYIPKEQKYSFLQNPQTSLCFSESIPTPSNREETQQKSNLELLRISLLLIQSWLEPVQFLRSVFANSLVYGASDSNVYDLLKDLEEGIQTLMGRLEDGSPRTGQIFKQTYSKFDTNSHNDDALLKNYGLLYCFRKDMDKVETFLRIVQCRSVEGSCGFGGTSESATPESGPGSEPATSGSETPGTSESATPESGPGSEPATSGSETPGTSESATPESGPGTSTEPSEGSAPGSPAGSPTSTEEGTSESATPESGPGSEPATSGSETPGTSESATPESGPGSPAGSPTSTEEGSPAGSPTSTEEGTSTEPSEGSAPGTSESATPESGPGTSESATPESGPGTSESATPESGPGSEPATSGSETPGSEPATSGSETPGSPAGSPTSTEEGTSTEPSEGSAPGTSTEPSEGSAPGSEPATSGSETPGTSESATPESGPGTSTEPSEGSAP

SEQ ID NO: 768 - DNA, 1878 bp, Artificial Sequence
  Description of Artificial Sequence: Synthetic polynucleotide
ggtagcgaaccggcaacttccggctctgaaaccccaggtacttctgaaagcgctactcctgagtctggcccaggtagcgaacctgctacctctggctctgaaaccccaggtagcccggcaggctctccgacttccaccgaggaaggtacctctactgaaccttctgagggtagcgctccaggtagcgaaccggcaacctctggctctgaaaccccaggtagcgaacctgctacctccggctctgaaactccaggtagcgaaccggctacttccggttctgaaactccaggtacctctaccgaaccttccgaaggcagcgcaccaggtacttctgaaagcgcaacccctgaatccggtccaggtagcgaaccggctacttctggctctgagactccaggtacttctaccgaaccgtccgaaggtagcgcaccaggttttccgactattccgctgtctcgtctgtttgataatgctatgctgcgtgcgcaccgtctgcaccagctggcctttgatacttaccaggaatttgaagaagcctacattcctaaagagcagaagtactctttcctgcaaaacccacagacttctctctgcttcagcgaatctattccgacgccttccaatcgcgaggaaactcagcaaaagtccaatctggaactactccgcatttctctgcttctgattcagagctggctagaaccagtgcaatttctgcgttccgtcttcgccaatagcctagtttatggcgcatccgacagcaacgtatacgatctcctgaaagatctcgaggaaggcattcagaccctgatgggtcgtctcgaggatggctctccgcgtactggtcagatcttcaagcagacttactctaaatttgatactaacagccacaatgacgatgcgcttctaaaaaactatggtctgctgtattgttttcgtaaagatatggacaaagttgaaaccttcctgcgtattgttcagtgtcgttccgttgagggcagctgtggtttctaaggtggtacctctgaaagcgcaactcctgagtctggcccaggtagcgaacctgctacctccggctctgagactccaggtacctctgaaagcgcaaccccggaatctggtccaggtagcgaacctgcaacctctggctctgaaaccccaggtacctctgaaagcgctactcctgaatctggcccaggtacttctactgaaccgtccgagggcagcgcaccaggtagccctgctggctctccaacctccaccgaagaaggtacctctgaaagcgcaacccctgaatccggcccaggtagcgaaccggcaacctccggttctgaaaccccaggtacttctgaaagcgctactcctgagtccggcccaggtagcccggctggctctccgacttccaccgaggaaggtagcccggctggctctccaacttctactgaagaaggtacttctaccgaaccttccgagggcagcgcaccaggtacttctgaaagcgctacccctgagtccggcccaggtacttctgaaagcgctactcctgaatccggtccaggtacttctgaaagcgctaccccggaatctggcccaggtagcgaaccggctacttctggttctgaaaccccaggtagcgaaccggctacctccggttctgaaactccaggtagcccagcaggctctccgacttccactgaggaaggtacttctactgaaccttccgaaggcagcgcaccaggtacctctactgaaccttctgagggcagcgctccaggtagcgaacctgcaacctctggctctgaaaccccaggtacctctgaaagcgctactcctgaatctggcccaggtacttctactgaaccgtccgagggcagcgcacca

SEQ ID NO: 769 - protein, 769 aa, Artificial Sequence
  Description of Artificial Sequence: Synthetic polypeptide
GTSESATPESGPGSEPATSGSETPGTSESATPESGPGSEPATSGSETPGTSESATPESGPGTSTEPSEGSAPGSPAGSPTSTEEGTSESATPESGPGSEPATSGSETPGTSESATPESGPGSPAGSPTSTEEGSPAGSPTSTEEGTSTEPSEGSAPGTSESATPESGPGTSESATPESGPGTSESATPESGPGSEPATSGSETPGSEPATSGSETPGSPAGSPTSTEEGTSTEPSEGSAPGTSTEPSEGSAPGSEPATSGSETPGTSESATPESGPGTSTEPSEGSAPGFPTIPLSRLFDNAMLRAHRLHQLAFDTYQEFEEAYIPKEQKYSFLQNPQTSLCFSESIPTPSNREETQQKSNLELLRISLLLIQSWLEPVQFLRSVFANSLVYGASDSNVYDLLKDLEEGIQTLMGRLEDGSPRTGQIFKQTYSKFDTNSHNDDALLKNYGLLYCFRKDMDKVETFLRIVQCRSVEGSCGFGGTSESATPESGPGSEPATSGSETPGTSESATPESGPGSEPATSGSETPGTSESATPESGPGTSTEPSEGSAPGSPAGSPTSTEEGTSESATPESGPGSEPATSGSETPGTSESATPESGPGSPAGSPTSTEEGSPAGSPTSTEEGTSTEPSEGSAPGTSESATPESGPGTSESATPESGPGTSESATPESGPGSEPATSGSETPGSEPATSGSETPGSPAGSPTSTEEGTSTEPSEGSAPGTSTEPSEGSAPGSEPATSGSETPGTSESATPESGPGTSTEPSEGSAP

SEQ ID NO: 770 - DNA, 2310 bp, Artificial Sequence
  Description of Artificial Sequence: Synthetic polynucleotide
ggtacctctgaaagcgcaactcctgagtctggcccaggtagcgaacctgctacctccggctctgagactccaggtacctctgaaagcgcaaccccggaatctggtccaggtagcgaacctgcaacctctggctctgaaaccccaggtacctctgaaagcgctactcctgaatctggcccaggtacttctactgaaccgtccgagggcagcgcaccaggtagccctgctggctctccaacctccaccgaagaaggtacctctgaaagcgcaacccctgaatccggcccaggtagcgaaccggcaacctccggttctgaaaccccaggtacttctgaaagcgctactcctgagtccggcccaggtagcccggctggctctccgacttccaccgaggaaggtagcccggctggctctccaacttctactgaagaaggtacttctaccgaaccttccgagggcagcgcaccaggtacttctgaaagcgctacccctgagtccggcccaggtacttctgaaagcgctactcctgaatccggtccaggtacttctgaaagcgctaccccggaatctggcccaggtagcgaaccggctacttctggttctgaaaccccaggtagcgaaccggctacctccggttctgaaactccaggtagcccagcaggctctccgacttccactgaggaaggtacttctactgaaccttccgaaggcagcgcaccaggtacctctactgaaccttctgagggcagcgctccaggtagcgaacctgcaacctctggctctgaaaccccaggtacctctgaaagcgctactcctgaatctggcccaggtacttctactgaaccgtccgagggcagcgcaccaggttttccgactattccgctgtctcgtctgtttgataatgctatgctgcgtgcgcaccgtctgcaccagctggcctttgatacttaccaggaatttgaagaagcctacattcctaaagagcagaagtactctttcctgcaaaacccacagacttctctctgcttcagcgaatctattccgacgccttccaatcgcgaggaaactcagcaaaagtccaatctggaactactccgcatttctctgcttctgattcagagctggctagaaccagtgcaatttctgcgttccgtcttcgccaatagcctagtttatggcgcatccgacagcaacgtatacgatctcctgaaagatctcgaggaaggcattcagaccctgatgggtcgtctcgaggatggctctccgcgtactggtcagatcttcaagcagacttactctaaatttgatactaacagccacaatgacgatgcgcttctaaaaaactatggtctgctgtattgttttcgtaaagatatggacaaagttgaaaccttcctgcgtattgttcagtgtcgttccgttgagggcagctgtggtttctaaggtggtacctctgaaagcgcaactcctgagtctggcccaggtagcgaacctgctacctccggctctgagactccaggtacctctgaaagcgcaaccccggaatctggtccaggtagcgaacctgcaacctctggctctgaaaccccaggtacctctgaaagcgctactcctgaatctggcccaggtacttctactgaaccgtccgagggcagcgcaccaggtagccctgctggctctccaacctccaccgaagaaggtacctctgaaagcgcaacccctgaatccggcccaggtagcgaaccggcaacctccggttctgaaaccccaggtacttctgaaagcgctactcctgagtccggcccaggtagcccggctggctctccgacttccaccgaggaaggtagcccggctggctctccaacttctactgaagaaggtacttctaccgaaccttccgagggcagcgcaccaggtacttctgaaagcgctacccctgagtccggcccaggtacttctgaaagcgctactcctgaatccggtccaggtacttctgaaagcgctaccccggaatctggcccaggtagcgaaccggctacttctggttctgaaaccccaggtagcgaaccggctacctccggttctgaaactccaggtagcccagcaggctctccgacttccactgaggaaggtacttctactgaaccttccgaaggcagcgcaccaggtacctctactgaaccttctgagggcagcgctccaggtagcgaacctgcaacctctggctctgaaaccccaggtacctctgaaagcgctactcctgaatctggcccaggtacttctactgaaccgtccgagggcagcgcacca

SEQ ID NO: 771 - protein, 625 aa, Artificial Sequence
  Description of Artificial Sequence: Synthetic polypeptide
GTSTPESGSASPGTSPSGESSTAPGTSPSGESSTAPGSTSSTAESPGPGSTSESPSGTAPGSTSSTAESPGPGTSPSGESSTAPGTSTPESGSASPGSTSSTAESPGPGTSPSGESSTAPGTSPSGESSTAPGTSPSGESSTAPGFPTIPLSRLFDNAMLRAHRLHQLAFDTYQEFEEAYIPKEQKYSFLQNPQTSLCFSESIPTPSNREETQQKSNLELLRISLLLIQSWLEPVQFLRSVFANSLVYGASDSNVYDLLKDLEEGIQTLMGRLEDGSPRTGQIFKQTYSKFDTNSHNDDALLKNYGLLYCFRKDMDKVETFLRIVQCRSVEGSCGFGGTSESATPESGPGSEPATSGSETPGTSESATPESGPGSEPATSGSETPGTSESATPESGPGTSTEPSEGSAPGSPAGSPTSTEEGTSESATPESGPGSEPATSGSETPGTSESATPESGPGSPAGSPTSTEEGSPAGSPTSTEEGTSTEPSEGSAPGTSESATPESGPGTSESATPESGPGTSESATPESGPGSEPATSGSETPGSEPATSGSETPGSPAGSPTSTEEGTSTEPSEGSAPGTSTEPSEGSAPGSEPATSGSETPGTSESATPESGPGTSTEPSEGSAP

SEQ ID NO: 772 - DNA, 1878 bp, Artificial Sequence
  Description of Artificial Sequence: Synthetic polynucleotide
ggtacttctactccggaaagcggttccgcatctccaggtacttctcctagcggtgaatcttctactgctccaggtacctctcctagcggcgaatcttctactgctccaggttctaccagctctaccgctgaatctcctggcccaggttctaccagcgaatccccgtctggcaccgcaccaggttctactagctctaccgcagaatctccgggtccaggtacttcccctagcggtgaatcttctactgctccaggtacctctactccggaaagcggctccgcatctccaggttctactagctctactgctgaatctcctggtccaggtacctcccctagcggcgaatcttctactgctccaggtacctctcctagcggcgaatcttctaccgctccaggtacctcccctagcggtgaatcttctaccgcaccaggttttccgactattccgctgtctcgtctgtttgataatgctatgctgcgtgcgcaccgtctgcaccagctggcctttgatacttaccaggaatttgaagaagcctacattcctaaagagcagaagtactctttcctgcaaaacccacagacttctctctgcttcagcgaatctattccgacgccttccaatcgcgaggaaactcagcaaaagtccaatctggaactactccgcatttctctgcttctgattcagagctggctagaaccagtgcaatttctgcgttccgtcttcgccaatagcctagtttatggcgcatccgacagcaacgtatacgatctcctgaaagatctcgaggaaggcattcagaccctgatgggtcgtctcgaggatggctctccgcgtactggtcagatcttcaagcagacttactctaaatttgatactaacagccacaatgacgatgcgcttctaaaaaactatggtctgctgtattgttttcgtaaagatatggacaaagttgaaaccttcctgcgtattgttcagtgtcgttccgttgagggcagctgtggtttctaaggtggtacctctgaaagcgcaactcctgagtctggcccaggtagcgaacctgctacctccggctctgagactccaggtacctctgaaagcgcaaccccggaatctggtccaggtagcgaacctgcaacctctggctctgaaaccccaggtacctctgaaagcgctactcctgaatctggcccaggtacttctactgaaccgtccgagggcagcgcaccaggtagccctgctggctctccaacctccaccgaagaaggtacctctgaaagcgcaacccctgaatccggcccaggtagcgaaccggcaacctccggttctgaaaccccaggtacttctgaaagcgctactcctgagtccggcccaggtagcccggctggctctccgacttccaccgaggaaggtagcccggctggctctccaacttctactgaagaaggtacttctaccgaaccttccgagggcagcgcaccaggtacttctgaaagcgctacccctgagtccggcccaggtacttctgaaagcgctactcctgaatccggtccaggtacttctgaaagcgctaccccggaatctggcccaggtagcgaaccggctacttctggttctgaaaccccaggtagcgaaccggctacctccggttctgaaactccaggtagcccagcaggctctccgacttccactgaggaaggtacttctactgaaccttccgaaggcagcgcaccaggtacctctactgaaccttctgagggcagcgctccaggtagcgaacctgcaacctctggctctgaaaccccaggtacctctgaaagcgctactcctgaatctggcccaggtacttctactgaaccgtccgagggcagcgcacca

SEQ ID NO: 773 - protein, 1057 aa, Artificial Sequence
  Description of Artificial Sequence: Synthetic polypeptide
GSSESGSSEGGPGSGGEPSESGSSGSSESGSSEGGPGSSESGSSEGGPGSSESGSSEGGPGSSESGSSEGGPGSSESGSSEGGPGESPGGSSGSESGSEGSSGPGESSGSSESGSSEGGPGSSESGSSEGGPGSSESGSSEGGPGSGGEPSESGSSGESPGGSSGSESGESPGGSSGSESGSGGEPSESGSSGSSESGSSEGGPGSGGEPSESGSSGSGGEPSESGSSGSEGSSGPGESSGESPGGSSGSESGSGGEPSESGSSGSGGEPSESGSSGSGGEPSESGSSGSSESGSSEGGPGESPGGSSGSESGESPGGSSGSESGESPGGSSGSESGESPGGSSGSESGESPGGSSGSESGSSESGSSEGGPGSGGEPSESGSSGSEGSSGPGESSGSSESGSSEGGPGSGGEPSESGSSGSSESGSSEGGPGSGGEPSESGSSGESPGGSSGSESGESPGGSSGSESGSSESGSSEGGPGSGGEPSESGSSGSSESGSSEGGPGSGGEPSESGSSGSGGEPSESGSSGESPGGSSGSESGSEGSSGPGESSGSSESGSSEGGPGSEGSSGPGESSGFPTIPLSRLFDNAMLRAHRLHQLAFDTYQEFEEAYIPKEQKYSFLQNPQTSLCFSESIPTPSNREETQQKSNLELLRISLLLIQSWLEPVQFLRSVFANSLVYGASDSNVYDLLKDLEEGIQTLMGRLEDGSPRTGQIFKQTYSKFDTNSHNDDALLKNYGLLYCFRKDMDKVETFLRIVQCRSVEGSCGFGGTSESATPESGPGSEPATSGSETPGTSESATPESGPGSEPATSGSETPGTSESATPESGPGTSTEPSEGSAPGSPAGSPTSTEEGTSESATPESGPGSEPATSGSETPGTSESATPESGPGSPAGSPTSTEEGSPAGSPTSTEEGTSTEPSEGSAPGTSESATPESGPGTSESATPESGPGTSESATPESGPGSEPATSGSETPGSEPATSGSETPGSPAGSPTSTEEGTSTEPSEGSAPGTSTEPSEGSAPGSEPATSGSETPGTSESATPESGPGTSTEPSEGSAP

SEQ ID NO: 774 - DNA, 3174 bp, Artificial Sequence
  Description of Artificial Sequence: Synthetic polynucleotide
ggttcctctgaaagcggttcttccgaaggtggtccaggttcctctgaaagcggttcttctgagggtggtccaggtgaatctccgggtggctccagcggttccgagtcaggttctggtggcgaaccttccgagtctggtagctcaggtgaatctccgggtggttctagcggttccgagtcaggtgaatctccgggtggttccagcggttctgagtcaggttcctccgaaagcggttcttctgagggcggtccaggttcctccgaaagcggttcttccgagggcggtccaggttcttctgaaagcggttcttccgagggcggtccaggtgaatctcctggtggttccagcggttccgagtcaggtgaatctccaggtggctctagcggttccgagtcaggtgaatctcctggtggttctagcggttctgaatcaggttcctccgaaagcggttcttctgagggcggtccaggttcctccgaaagcggttcttccgagggcggtccaggttcttctgaaagcggttcttccgagggcggtccaggttcctctgaaagcggttcttctgagggcggtccaggttcttccgaaagcggttcttccgagggcggtccaggttcttccgaaagcggttcttctgaaggcggtccaggttctggtggcgaaccgtccgagtctggtagctcaggtgaatctccgggtggctctagcggttccgagtcaggtgaatctcctggtggttccagcggttccgagtcaggttccggtggcgaaccgtccgaatctggtagctcaggtagcgaaggttcttctggtccaggcgaatcttcaggttcctctgaaagcggttcttctgagggcggtccaggttccggtggcgaaccgtccgaatctggtagctcaggtagcgaaggttcttctggtccaggcgaatcttcaggttcctctgaaagcggttcttctgagggcggtccaggttccggtggcgaaccttccgaatctggtagctcaggtgaatctccgggtggttctagcggttctgagtcaggttctggtggtgaaccttccgagtctggtagctcaggttctggtggcgaaccatccgagtctggtagctcaggttcttccgaaagcggttcttccgaaggcggtccaggttctggtggtgaaccgtccgaatctggtagctcaggttctggtggcgaaccatccgaatctggtagctcaggtagcgaaggttcttctggtcctggcgaatcttcaggtgaatctccaggtggctctagcggttccgaatcaggtagcgaaggttcttccggtccaggtgaatcttcaggtagcgaaggttcttctggtcctggtgaatcctcaggttccggtggcgaaccatctgaatctggtagctcaggttcctctgaaagcggttcttccgaaggtggtccaggttcctctgaaagcggttcttctgagggtggtccaggtgaatctccgggtggctccagcggttccgagtcaggttctggtggcgaaccatccgaatctggtagctcaggtagcgaaggttcttctggtcctggcgaatcttcaggtgaatctccaggtggctctagcggttccgaatcaggtagcgaaggttcttccggtcctggtgagtcttcaggtgaatctccaggtggctctagcggttccgagtcaggtagcgaaggttcttctggtcctggcgagtcctcaggttttccgactattccgctgtctcgtctgtttgataatgctatgctgcgtgcgcaccgtctgcaccagctggcctttgatacttaccaggaatttgaagaagcctacattcctaaagagcagaagtactctttcctgcaaaacccacagacttctctctgcttcagcgaatctattccgacgccttccaatcgcgaggaaactcagcaaaagtccaatctggaactactccgcatttctctgcttctgattcagagctggctagaaccagtgcaatttctgcgttccgtcttcgccaatagcctagtttatggcgcatccgacagcaacgtatacgatctcctgaaagatctcgaggaaggcattcagaccctgatgggtcgtctcgaggatggctctccgcgtactggtcagatcttcaagcagacttactctaaatttgatactaacagccacaatgacgatgcgcttctaaaaaactatggtctgctgtattgttttcgtaaagatatggacaaagttgaaaccttcctgcgtattgttcagtgtcgttccgttgagggcagctgtggtttctaaggtggtacctctgaaagcgcaactcctgagtctggcccaggtagcgaacctgctacctccggctctgagactccaggtacctctgaaagcgcaaccccggaatctggtccaggtagcgaacctgcaacctctggctctgaaaccccaggtacctctgaaagcgctactcctgaatctggcccaggtacttctactgaaccgtccgagggcagcgcaccaggtagccctgctggctctccaacctccaccgaagaaggtacctctgaaagcgcaacccctgaatccggcccaggtagcgaaccggcaacctccggttctgaaaccccaggtacttctgaaagcgctactcctgagtccggcccaggtagcccggctggctctccgacttccaccgaggaaggtagcccggctggctctccaacttctactgaagaaggtacttctaccgaaccttccgagggcagcgcaccaggtacttctgaaagcgctacccctgagtccggcccaggtacttctgaaagcgctactcctgaatccggtccaggtacttctgaaagcgctaccccggaatctggcccaggtagcgaaccggctacttctggttctgaaaccccaggtagcgaaccggctacctccggttctgaaactccaggtagcccagcaggctctccgacttccactgaggaaggtacttctactgaaccttccgaaggcagcgcaccaggtacctctactgaaccttctgagggcagcgctccaggtagcgaacctgcaacctctggctctgaaaccccaggtacctctgaaagcgctactcctgaatctggcccaggtacttctactgaaccgtccgagggcagcgcacca

SEQ ID NO: 775 - protein, 1057 aa, Artificial Sequence
  Description of Artificial Sequence: Synthetic polypeptide
GSPAGSPTSTEEGTSESATPESGPGTSTEPSEGSAPGSPAGSPTSTEEGTSTEPSEGSAPGTSTEPSEGSAPGTSESATPESGPGSEPATSGSETPGSEPATSGSETPGSPAGSPTSTEEGTSESATPESGPGTSTEPSEGSAPGTSTEPSEGSAPGSPAGSPTSTEEGTSTEPSEGSAPGTSTEPSEGSAPGTSESATPESGPGTSTEPSEGSAPGTSESATPESGPGSEPATSGSETPGTSTEPSEGSAPGTSTEPSEGSAPGTSESATPESGPGTSESATPESGPGSPAGSPTSTEEGTSESATPESGPGSEPATSGSETPGTSESATPESGPGTSTEPSEGSAPGTSTEPSEGSAPGTSTEPSEGSAPGTSTEPSEGSAPGTSTEPSEGSAPGTSTEPSEGSAPGSPAGSPTSTEEGTSTEPSEGSAPGTSESATPESGPGSEPATSGSETPGTSESATPESGPGSEPATSGSETPGTSESATPESGPGTSTEPSEGSAPGTSESATPESGPGSPAGSPTSTEEGSPAGSPTSTEEGSPAGSPTSTEEGTSESATPESGPGTSTEPSEGSAPGFPTIPLSRLFDNAMLRAHRLHQLAFDTYQEFEEAYIPKEQKYSFLQNPQTSLCFSESIPTPSNREETQQKSNLELLRISLLLIQSWLEPVQFLRSVFANSLVYGASDSNVYDLLKDLEEGIQTLMGRLEDGSPRTGQIFKQTYSKFDTNSHNDDALLKNYGLLYCFRKDMDKVETFLRIVQCRSVEGSCGFGGTSESATPESGPGSEPATSGSETPGTSESATPESGPGSEPATSGSETPGTSESATPESGPGTSTEPSEGSAPGSPAGSPTSTEEGTSESATPESGPGSEPATSGSETPGTSESATPESGPGSPAGSPTSTEEGSPAGSPTSTEEGTSTEPSEGSAPGTSESATPESGPGTSESATPESGPGTSESATPESGPGSEPATSGSETPGSEPATSGSETPGSPAGSPTSTEEGTSTEPSEGSAPGTSTEPSEGSAPGSEPATSGSETPGTSESATPESGPGTSTEPSEGSAP

SEQ ID NO: 776 - DNA, 3174 bp, Artificial Sequence
  Description of Artificial Sequence: Synthetic polynucleotide
ggtagcccggctggctctcctacctctactgaggaaggtacttctgaaagcgctactcctgagtctggtccaggtacctctactgaaccgtccgaaggtagcgctccaggtagcccagcaggctctccgacttccactgaggaaggtacttctactgaaccttccgaaggcagcgcaccaggtacctctactgaaccttctgagggcagcgctccaggtacttctgaaagcgctaccccggaatctggcccaggtagcgaaccggctacttctggttctgaaaccccaggtagcgaaccggctacctccggttctgaaactccaggtagcccggcaggctctccgacctctactgaggaaggtacttctgaaagcgcaaccccggagtccggcccaggtacctctaccgaaccgtctgagggcagcgcaccaggtacttctaccgaaccgtccgagggtagcgcaccaggtagcccagcaggttctcctacctccaccgaggaaggtacttctaccgaaccgtccgagggtagcgcaccaggtacctctactgaaccttctgagggcagcgctccaggtacttctgaaagcgctaccccggagtccggtccaggtacttctactgaaccgtccgaaggtagcgcaccaggtacttctgaaagcgcaacccctgaatccggtccaggtagcgaaccggctacttctggctctgagactccaggtacttctaccgaaccgtccgaaggtagcgcaccaggtacttctactgaaccgtctgaaggtagcgcaccaggtacttctgaaagcgcaaccccggaatccggcccaggtacctctgaaagcgcaaccccggagtccggcccaggtagccctgctggctctccaacctccaccgaagaaggtacctctgaaagcgcaacccctgaatccggcccaggtagcgaaccggcaacctccggttctgaaaccccaggtacctctgaaagcgctactccggagtctggcccaggtacctctactgaaccgtctgagggtagcgctccaggtacttctactgaaccgtccgaaggtagcgcaccaggtacttctaccgaaccgtccgaaggcagcgctccaggtacctctactgaaccttccgagggcagcgctccaggtacctctaccgaaccttctgaaggtagcgcaccaggtacttctaccgaaccgtccgagggtagcgcaccaggtagcccagcaggttctcctacctccaccgaggaaggtacttctaccgaaccgtccgagggtagcgcaccaggtacctctgaaagcgcaactcctgagtctggcccaggtagcgaacctgctacctccggctctgagactccaggtacctctgaaagcgcaaccccggaatctggtccaggtagcgaacctgcaacctctggctctgaaaccccaggtacctctgaaagcgctactcctgaatctggcccaggtacttctactgaaccgtccgagggcagcgcaccaggtacttctgaaagcgctactcctgagtccggcccaggtagcccggctggctctccgacttccaccgaggaaggtagcccggctggctctccaacttctactgaagaaggtagcccggcaggctctccgacctctactgaggaaggtacttctgaaagcgcaaccccggagtccggcccaggtacctctaccgaaccgtctgagggcagcgcaccaggttttccgactattccgctgtctcgtctgtttgataatgctatgctgcgtgcgcaccgtctgcaccagctggcctttgatacttaccaggaatttgaagaagcctacattcctaaagagcagaagtactctttcctgcaaaacccacagacttctctctgcttcagcgaatctattccgacgccttccaatcgcgaggaaactcagcaaaagtccaatctggaactactccgcatttctctgcttctgattcagagctggctagaaccagtgcaatttctgcgttccgtcttcgccaatagcctagtttatggcgcatccgacagcaacgtatacgatctcctgaaagatctcgaggaaggcattcagaccctgatgggtcgtctcgaggatggctctccgcgtactggtcagatcttcaagcagacttactctaaatttgatactaacagccacaatgacgatgcgcttctaaaaaactatggtctgctgtattgttttcgtaaagatatggacaaagttgaaaccttcctgcgtattgttcagtgtcgttccgttgagggcagctgtggtttctaaggtggtacctctgaaagcgcaactcctgagtctggcccaggtagcgaacctgctacctccggctctgagactccaggtacctctgaaagcgcaaccccggaatctggtccaggtagcgaacctgcaacctctggctctgaaaccccaggtacctctgaaagcgctactcctgaatctggcccaggtacttctactgaaccgtccgagggcagcgcaccaggtagccctgctggctctccaacctccaccgaagaaggtacctctgaaagcgcaacccctgaatccggcccaggtagcgaaccggcaacctccggttctgaaaccccaggtacttctgaaagcgctactcctgagtccggcccaggtagcccggctggctctccgacttccaccgaggaaggtagcccggctggctctccaacttctactgaagaaggtacttctaccgaaccttccgagggcagcgcaccaggtacttctgaaagcgctacccctgagtccggcccaggtacttctgaaagcgctactcctgaatccggtccaggtacttctgaaagcgctaccccggaatctggcccaggtagcgaaccggctacttctggttctgaaaccccaggtagcgaaccggctacctccggttctgaaactccaggtagcccagcaggctctccgacttccactgaggaaggtacttctactgaaccttccgaaggcagcgcaccaggtacctctactgaaccttctgagggcagcgctccaggtagcgaacctgcaacctctggctctgaaaccccaggtacctctgaaagcgctactcctgaatctggcccaggtacttctactgaaccgtccgagggcagcgcacca

SEQ ID NO: 777 - protein, 1057 aa, Artificial Sequence
  Description of Artificial Sequence: Synthetic polypeptide
GSTSSTAESPGPGSTSSTAESPGPGSTSESPSGTAPGSTSSTAESPGPGSTSSTAESPGPGTSTPESGSASPGSTSESPSGTAPGTSPSGESSTAPGSTSESPSGTAPGSTSESPSGTAPGTSPSGESSTAPGSTSESPSGTAPGSTSESPSGTAPGTSPSGESSTAPGSTSESPSGTAPGSTSESPSGTAPGSTSESPSGTAPGTSTPESGSASPGSTSESPSGTAPGTSTPESGSASPGSTSSTAESPGPGSTSSTAESPGPGTSTPESGSASPGTSTPESGSASPGSTSESPSGTAPGTSTPESGSASPGTSTPESGSASPGSTSESPSGTAPGSTSESPSGTAPGSTSESPSGTAPGSTSSTAESPGPGTSTPESGSASPGTSTPESGSASPGSTSESPSGTAPGSTSESPSGTAPGTSTPESGSASPGSTSESPSGTAPGSTSESPSGTAPGTSTPESGSASPGTSPSGESSTAPGSTSSTAESPGPGTSPSGESSTAPGSTSSTAESPGPGTSTPESGSASPGSTSESPSGTAPGSTSSTAESPGPGTSTPESGSASPGTSTPESGSASPGFPTIPLSRLFDNAMLRAHRLHQLAFDTYQEFEEAYIPKEQKYSFLQNPQTSLCFSESIPTPSNREETQQKSNLELLRISLLLIQSWLEPVQFLRSVFANSLVYGASDSNVYDLLKDLEEGIQTLMGRLEDGSPRTGQIFKQTYSKFDTNSHNDDALLKNYGLLYCFRKDMDKVETFLRIVQCRSVEGSCGFGGTSESATPESGPGSEPATSGSETPGTSESATPESGPGSEPATSGSETPGTSESATPESGPGTSTEPSEGSAPGSPAGSPTSTEEGTSESATPESGPGSEPATSGSETPGTSESATPESGPGSPAGSPTSTEEGSPAGSPTSTEEGTSTEPSEGSAPGTSESATPESGPGTSESATPESGPGTSESATPESGPGSEPATSGSETPGSEPATSGSETPGSPAGSPTSTEEGTSTEPSEGSAPGTSTEPSEGSAPGSEPATSGSETPGTSESATPESGPGTSTEPSEGSAP

SEQ ID NO: 778 - DNA, 3174 bp, Artificial Sequence
  Description of Artificial Sequence: Synthetic polynucleotide
ggttctactagctctaccgctgaatctcctggcccaggttccactagctctaccgcagaatctccgggcccaggttctactagcgaatccccttctggtaccgctccaggttctactagctctaccgctgaatctccgggtccaggttctaccagctctactgcagaatctcctggcccaggtacttctactccggaaagcggttccgcttctccaggttctaccagcgaatctccttctggcaccgctccaggtacctctcctagcggcgaatcttctaccgctccaggttctactagcgaatctccttctggcactgcaccaggttctaccagcgaatctccttctggcaccgctccaggtacctctcctagcggcgaatcttctaccgctccaggttctactagcgaatctccttctggcactgcaccaggttctaccagcgaatctccttctggcaccgctccaggtacctctcctagcggcgaatcttctaccgctccaggttctactagcgaatctccttctggcactgcaccaggttctactagcgaatctccttctggcactgcaccaggttctaccagcgaatctccgtctggcactgcaccaggtacctctacccctgaaagcggttccgcttctccaggttctactagcgaatctccttctggtaccgctccaggtacttctacccctgaaagcggctccgcttctccaggttccactagctctaccgctgaatctccgggtccaggttctactagctctactgcagaatctcctggcccaggtacctctactccggaaagcggctctgcatctccaggtacttctacccctgaaagcggttctgcatctccaggttctactagcgaatccccgtctggtaccgcaccaggtacttctaccccggaaagcggctctgcttctccaggtacttctaccccggaaagcggctccgcatctccaggttctactagcgaatctccttctggtaccgctccaggttctaccagcgaatccccgtctggtactgctccaggttctaccagcgaatctccttctggtactgcaccaggttctactagctctactgcagaatctcctggcccaggtacctctactccggaaagcggctctgcatctccaggtacttctacccctgaaagcggttctgcatctccaggttctactagcgaatctccttctggcactgcaccaggttctaccagcgaatctccgtctggcactgcaccaggtacctctacccctgaaagcggttccgcttctccaggttctactagcgaatctccttctggcactgcaccaggttctaccagcgaatctccgtctggcactgcaccaggtacctctacccctgaaagcggttccgcttctccaggtacttctccgagcggtgaatcttctaccgcaccaggttctactagctctaccgctgaatctccgggcccaggtacttctccgagcggtgaatcttctactgctccaggttccactagctctactgctgaatctcctggcccaggtacttctactccggaaagcggttccgcttctccaggttctactagcgaatctccgtctggcaccgcaccaggttctactagctctactgcagaatctcctggcccaggtacctctactccggaaagcggctctgcatctccaggtacttctacccctgaaagcggttctgcatctccaggttttccgactattccgctgtctcgtctgtttgataatgctatgctgcgtgcgcaccgtctgcaccagctggcctttgatacttaccaggaatttgaagaagcctacattcctaaagagcagaagtactctttcctgcaaaacccacagacttctctctgcttcagcgaatctattccgacgccttccaatcgcgaggaaactcagcaaaagtccaatctggaactactccgcatttctctgcttctgattcagagctggctagaaccagtgcaatttctgcgttccgtcttcgccaatagcctagtttatggcgcatccgacagcaacgtatacgatctcctgaaagatctcgaggaaggcattcagaccctgatgggtcgtctcgaggatggctctccgcgtactggtcagatcttcaagcagacttactctaaatttgatactaacagccacaatgacgatgcgcttctaaaaaactatggtctgctgtattgttttcgtaaagatatggacaaagttgaaaccttcctgcgtattgttcagtgtcgttccgttgagggcagctgtggtttctaaggtggtacctctgaaagcgcaactcctgagtctggcccaggtagcgaacctgctacctccggctctgagactccaggtacctctgaaagcgcaaccccggaatctggtccaggtagcgaacctgcaacctctggctctgaaaccccaggtacctctgaaagcgctactcctgaatctggcccaggtacttctactgaaccgtccgagggcagcgcaccaggtagccctgctggctctccaacctccaccgaagaaggtacctctgaaagcgcaacccctgaatccggcccaggtagcgaaccggcaacctccggttctgaaaccccaggtacttctgaaagcgctactcctgagtccggcccaggtagcccggctggctctccgacttccaccgaggaaggtagcccggctggctctccaacttctactgaagaaggtacttctaccgaaccttccgagggcagcgcaccaggtacttctgaaagcgctacccctgagtccggcccaggtacttctgaaagcgctactcctgaatccggtccaggtacttctgaaagcgctaccccggaatctggcccaggtagcgaaccggctacttctggttctgaaaccccaggtagcgaaccggctacctccggttctgaaactccaggtagcccagcaggctctccgacttccactgaggaaggtacttctactgaaccttccgaaggcagcgcaccaggtacctctactgaaccttctgagggcagcgctccaggtagcgaacctgcaacctctggctctgaaaccccaggtacctctgaaagcgctactcctgaatctggcccaggtacttctactgaaccgtccgagggcagcgcacca

SEQ ID NO: 779 - protein, 1106 aa, Artificial Sequence
  Description of Artificial Sequence: Synthetic polypeptide
MAEPAGSPTSTEEGTPGSGTASSSPGSSTPSGATGSPGASPGTSSTGSPGSPAGSPTSTEEGTSESATPESGPGTSTEPSEGSAPGSPAGSPTSTEEGTSTEPSEGSAPGTSTEPSEGSAPGTSESATPESGPGSEPATSGSETPGSEPATSGSETPGSPAGSPTSTEEGTSESATPESGPGTSTEPSEGSAPGTSTEPSEGSAPGSPAGSPTSTEEGTSTEPSEGSAPGTSTEPSEGSAPGTSESATPESGPGTSTEPSEGSAPGTSESATPESGPGSEPATSGSETPGTSTEPSEGSAPGTSTEPSEGSAPGTSESATPESGPGTSESATPESGPGSPAGSPTSTEEGTSESATPESGPGSEPATSGSETPGTSESATPESGPGTSTEPSEGSAPGTSTEPSEGSAPGTSTEPSEGSAPGTSTEPSEGSAPGTSTEPSEGSAPGTSTEPSEGSAPGSPAGSPTSTEEGTSTEPSEGSAPGTSESATPESGPGSEPATSGSETPGTSESATPESGPGSEPATSGSETPGTSESATPESGPGTSTEPSEGSAPGTSESATPESGPGSPAGSPTSTEEGSPAGSPTSTEEGSPAGSPTSTEEGTSESATPESGPGTSTEPSEGSAPGFPTIPLSRLFDNAMLRAHRLHQLAFDTYQEFEEAYIPKEQKYSFLQNPQTSLCFSESIPTPSNREETQQKSNLELLRISLLLIQSWLEPVQFLRSVFANSLVYGASDSNVYDLLKDLEEGIQTLMGRLEDGSPRTGQIFKQTYSKFDTNSHNDDALLKNYGLLYCFRKDMDKVETFLRIVQCRSVEGSCGFGGTSESATPESGPGSEPATSGSETPGTSESATPESGPGSEPATSGSETPGTSESATPESGPGTSTEPSEGSAPGSPAGSPTSTEEGTSESATPESGPGSEPATSGSETPGTSESATPESGPGSPAGSPTSTEEGSPAGSPTSTEEGTSTEPSEGSAPGTSESATPESGPGTSESATPESGPGTSESATPESGPGSEPATSGSETPGSEPATSGSETPGSPAGSPTSTEEGTSTEPSEGSAPGTSTEPSEGSAPGSEPATSGSETPGTSESATPESGPGTSTEPSEGSAP

SEQ ID NO: 780 - DNA, 3321 bp, Artificial Sequence
  Description of Artificial Sequence: Synthetic polynucleotide
atggctgaacctgctggctctccaacctccactgaggaaggtaccccgggtagcggtactgcttcttcctctccaggtagctctaccccttctggtgcaaccggctctccaggtgcttctccgggcaccagctctaccggttctccaggtagcccggctggctctcctacctctactgaggaaggtacttctgaaagcgctactcctgagtctggtccaggtacctctactgaaccgtccgaaggtagcgctccaggtagcccagcaggctctccgacttccactgaggaaggtacttctactgaaccttccgaaggcagcgcaccaggtacctctactgaaccttctgagggcagcgctccaggtacttctgaaagcgctaccccggaatctggcccaggtagcgaaccggctacttctggttctgaaaccccaggtagcgaaccggctacctccggttctgaaactccaggtagcccggcaggctctccgacctctactgaggaaggtacttctgaaagcgcaaccccggagtccggcccaggtacctctaccgaaccgtctgagggcagcgcaccaggtacttctaccgaaccgtccgagggtagcgcaccaggtagcccagcaggttctcctacctccaccgaggaaggtacttctaccgaaccgtccgagggtagcgcaccaggtacctctactgaaccttctgagggcagcgctccaggtacttctgaaagcgctaccccggagtccggtccaggtacttctactgaaccgtccgaaggtagcgcaccaggtacttctgaaagcgcaacccctgaatccggtccaggtagcgaaccggctacttctggctctgagactccaggtacttctaccgaaccgtccgaaggtagcgcaccaggtacttctactgaaccgtctgaaggtagcgcaccaggtacttctgaaagcgcaaccccggaatccggcccaggtacctctgaaagcgcaaccccggagtccggcccaggtagccctgctggctctccaacctccaccgaagaaggtacctctgaaagcgcaacccctgaatccggcccaggtagcgaaccggcaacctccggttctgaaaccccaggtacctctgaaagcgctactccggagtctggcccaggtacctctactgaaccgtctgagggtagcgctccaggtacttctactgaaccgtccgaaggtagcgcaccaggtacttctaccgaaccgtccgaaggcagcgctccaggtacctctactgaaccttccgagggcagcgctccaggtacctctaccgaaccttctgaaggtagcgcaccaggtacttctaccgaaccgtccgagggtagcgcaccaggtagcccagcaggttctcctacctccaccgaggaaggtacttctaccgaaccgtccgagggtagcgcaccaggtacctctgaaagcgcaactcctgagtctggcccaggtagcgaacctgctacctccggctctgagactccaggtacctctgaaagcgcaaccccggaatctggtccaggtagcgaacctgcaacctctggctctgaaaccccaggtacctctgaaagcgctactcctgaatctggcccaggtacttctactgaaccgtccgagggcagcgcaccaggtacttctgaaagcgctactcctgagtccggcccaggtagcccggctggctctccgacttccaccgaggaaggtagcccggctggctctccaacttctactgaagaaggtagcccggcaggctctccgacctctactgaggaaggtacttctgaaagcgcaaccccggagtccggcccaggtacctctaccgaaccgtctgagggcagcgcaccaggttttccgactattccgctgtctcgtctgtttgataatgctatgctgcgtgcgcaccgtctgcaccagctggcctttgatacttaccaggaatttgaagaagcctacattcctaaagagcagaagtactctttcctgcaaaacccacagacttctctctgcttcagcgaatctattccgacgccttccaatcgcgaggaaactcagcaaaagtccaatctggaactactccgcatttctctgcttctgattcagagctggctagaaccagtgcaatttctgcgttccgtcttcgccaatagcctagtttatggcgcatccgacagcaacgtatacgatctcctgaaagatctcgaggaaggcattcagaccctgatgggtcgtctcgaggatggctctccgcgtactggtcagatcttcaagcagacttactctaaatttgatactaacagccacaatgacgatgcgcttctaaaaaactatggtctgctgtattgttttcgtaaagatatggacaaagttgaaaccttcctgcgtattgttcagtgtcgttccgttgagggcagctgtggtttctaaggtggtacctctgaaagcgcaactcctgagtctggcccaggtagcgaacctgctacctccggctctgagactccaggtacctctgaaagcgcaaccccggaatctggtccaggtagcgaacctgcaacctctggctctgaaaccccaggtacctctgaaagcgctactcctgaatctggcccaggtacttctactgaaccgtccgagggcagcgcaccaggtagccctgctggctctccaacctccaccgaagaaggtacctctgaaagcgcaacccctgaatccggcccaggtagcgaaccggcaacctccggttctgaaaccccaggtacttctgaaagcgctactcctgagtccggcccaggtagcccggctggctctccgacttccaccgaggaaggtagcccggctggctctccaacttctactgaagaaggtacttctaccgaaccttccgagggcagcgcaccaggtacttctgaaagcgctacccctgagtccggcccaggtacttctgaaagcgctactcctgaatccggtccaggtacttctgaaagcgctaccccggaatctggcccaggtagcgaaccggctacttctggttctgaaaccccaggtagcgaaccggctacctccggttctgaaactccaggtagcccagcaggctctccgacttccactgaggaaggtacttctactgaaccttccgaaggcagcgcaccaggtacctctactgaaccttctgagggcagcgctccaggtagcgaacctgcaacctctggctctgaaaccccaggtacctctgaaagcgctactcctgaatctggcccaggtacttctactgaaccgtccgagggcagcgcacca

SEQ ID NO: 781 - protein, 1317 aa, Artificial Sequence
  Description of Artificial Sequence: Synthetic polypeptide
GSSESGSSEGGPGSSESGSSEGGPGESPGGSSGSESGSGGEPSESGSSGESPGGSSGSESGESPGGSSGSESGSSESGSSEGGPGSSESGSSEGGPGSSESGSSEGGPGESPGGSSGSESGESPGGSSGSESGESPGGSSGSESGSSESGSSEGGPGSSESGSSEGGPGSSESGSSEGGPGSSESGSSEGGPGSSESGSSEGGPGSSESGSSEGGPGSGGEPSESGSSGESPGGSSGSESGESPGGSSGSESGSGGEPSESGSSGSEGSSGPGESSGSSESGSSEGGPGSGGEPSESGSSGSEGSSGPGESSGSSESGSSEGGPGSGGEPSESGSSGESPGGSSGSESGSGGEPSESGSSGSGGEPSESGSSGSSESGSSEGGPGSGGEPSESGSSGSGGEPSESGSSGSEGSSGPGESSGESPGGSSGSESGSEGSSGPGESSGSEGSSGPGESSGSGGEPSESGSSGSSESGSSEGGPGSSESGSSEGGPGESPGGSSGSESGSGGEPSESGSSGSEGSSGPGESSGESPGGSSGSESGSEGSSGPGSSESGSSEGGPGSGGEPSESGSSGSEGSSGPGESSGSEGSSGPGESSGSEGSSGPGESSGSGGEPSESGSSGSGGEPSESGSSGESPGGSSGSESGESPGGSSGSESGSGGEPSESGSSGSEGSSGPGESSGESPGGSSGSESGSSESGSSEGGPGSSESGSSEGGPGSSESGSSEGGPGSGGEPSESGSSGSSESGSSEGGPGESPGGSSGSESGSGGEPSESGSSGSSESGSSEGGPGESPGGSSGSESGSGGEPSESGSSGESPGGSSGSESGSGGEPSESGSSGFPTIPLSRLFDNAMLRAHRLHQLAFDTYQEFEEAYIPKEQKYSFLQNPQTSLCFSESIPTPSNREETQQKSNLELLRISLLLIQSWLEPVQFLRSVFANSLVYGASDSNVYDLLKDLEEGIQTLMGRLEDGSPRTGQIFKQTYSKFDTNSHNDDALLKNYGLLYCFRKDMDKVETFLRIVQCRSVEGSCGFGGTSESATPESGPGSEPATSGSETPGTSESATPESGPGSEPATSGSETPGTSESATPESGPGTSTEPSEGSAPGSPAGSPTSTEEGTSESATPESGPGSEPATSGSETPGTSESATPESGPGSPAGSPTSTEEGSPAGSPTSTEEGTSTEPSEGSAPGTSESATPESGPGTSESATPESGPGTSESATPESGPGSEPATSGSETPGSEPATSGSETPGSPAGSPTSTEEGTSTEPSEGSAPGTSTEPSEGSAPGSEPATSGSETPGTSESATPESGPGTSTEPSEGSAP

SEQ ID NO: 782 - DNA, 3954 bp, Artificial Sequence
  Description of Artificial Sequence: Synthetic polynucleotide
ggttcctctgaaagcggttcttccgaaggtggtccaggttcctctgaaagcggttcttctgagggtggtccaggtgaatctccgggtggctccagcggttccgagtcaggttctggtggcgaaccttccgagtctggtagctcaggtgaatctccgggtggttctagcggttccgagtcaggtgaatctccgggtggttccagcggttctgagtcaggttcctccgaaagcggttcttctgagggcggtccaggttcctccgaaagcggttcttccgagggcggtccaggttcttctgaaagcggttcttccgagggcggtccaggtgaatctcctggtggttccagcggttccgagtcaggtgaatctccaggtggctctagcggttccgagtcaggtgaatctcctggtggttctagcggttctgaatcaggttcctccgaaagcggttcttctgagggcggtccaggttcctccgaaagcggttcttccgagggcggtccaggttcttctgaaagcggttcttccgagggcggtccaggttcctctgaaagcggttcttctgagggcggtccaggttcttccgaaagcggttcttccgagggcggtccaggttcttccgaaagcggttcttctgaaggcggtccaggttctggtggcgaaccgtccgagtctggtagctcaggtgaatctccgggtggctctagcggttccgagtcaggtgaatctcctggtggttccagcggttccgagtcaggttccggtggcgaaccgtccgaatctggtagctcaggtagcgaaggttcttctggtccaggcgaatcttcaggttcctctgaaagcggttcttctgagggcggtccaggttccggtggcgaaccgtccgaatctggtagctcaggtagcgaaggttcttctggtccaggcgaatcttcaggttcctctgaaagcggttcttctgagggcggtccaggttccggtggcgaaccttccgaatctggtagctcaggtgaatctccgggtggttctagcggttctgagtcaggttctggtggtgaaccttccgagtctggtagctcaggttctggtggcgaaccatccgagtctggtagctcaggttcttccgaaagcggttcttccgaaggcggtccaggttctggtggtgaaccgtccgaatctggtagctcaggttctggtggcgaaccatccgaatctggtagctcaggtagcgaaggttcttctggtcctggcgaatcttcaggtgaatctccaggtggctctagcggttccgaatcaggtagcgaaggttcttccggtccaggtgaatcttcaggtagcgaaggttcttctggtcctggtgaatcctcaggttccggtggcgaaccatctgaatctggtagctcaggttcctctgaaagcggttcttccgaaggtggtccaggttcctctgaaagcggttcttctgagggtggtccaggtgaatctccgggtggctccagcggttccgagtcaggttctggtggcgaaccatccgaatctggtagctcaggtagcgaaggttcttctggtcctggcgaatcttcaggtgaatctccaggtggctctagcggttccgaatcaggtagcgaaggttcttccggtccaggttcctctgaaagcggttcttctgagggcggtccaggttctggtggcgaaccatctgaatctggtagctcaggtagcgaaggttcttccggtccgggtgaatcttcaggtagcgaaggttcttccggtccaggtgaatcttcaggtagcgaaggttcttctggtcctggtgaatcctcaggttccggtggcgaaccatctgaatctggtagctcaggttctggtggcgaaccatccgaatctggtagctcaggtgaatctccgggtggctccagcggttctgaatcaggtgaatctcctggtggctccagcggttctgagtcaggttctggtggcgaaccatccgaatctggtagctcaggtagcgaaggttcttctggtcctggcgaatcttcaggtgaatctccaggtggctctagcggttccgaatcaggttcctctgaaagcggttcttctgagggcggtccaggttcttccgaaagcggttcttccgagggcggtccaggttcttccgaaagcggttcttctgaaggcggtccaggttctggtggcgaaccgtccgaatctggtagctcaggttcctccgaaagcggttcttctgaaggtggtccaggtgaatctccaggtggttctagcggttctgaatcaggttctggtggcgaaccgtccgaatctggtagctcaggttcctccgaaagcggttcttctgaaggtggtccaggtgaatctccaggtggttctagcggttctgaatcaggttctggtggcgaaccgtccgaatctggtagctcaggtgaatctcctggtggttccagcggttccgagtcaggttctggtggcgaaccttccgaatctggtagctcaggttttccgactattccgctgtctcgtctgtttgataatgctatgctgcgtgcgcaccgtctgcaccagctggcctttgatacttaccaggaatttgaagaagcctacattcctaaagagcagaagtactctttcctgcaaaacccacagacttctctctgcttcagcgaatctattccgacgccttccaatcgcgaggaaactcagcaaaagtccaatctggaactactccgcatttctctgcttctgattcagagctggctagaaccagtgcaatttctgcgttccgtcttcgccaatagcctagtttatggcgcatccgacagcaacgtatacgatctcctgaaagatctcgaggaaggcattcagaccctgatgggtcgtctcgaggatggctctccgcgtactggtcagatcttcaagcagacttactctaaatttgatactaacagccacaatgacgatgcgcttctaaaaaactatggtctgctgtattgttttcgtaaagatatggacaaagttgaaaccttcctgcgtattgttcagtgtcgttccgttgagggcagctgtggtttctaaggtggtacctctgaaagcgcaactcctgagtctggcccaggtagcgaacctgctacctccggctctgagactccaggtacctctgaaagcgcaaccccggaatctggtccaggtagcgaacctgcaacctctggctctgaaaccccaggtacctctgaaagcgctactcctgaatctggcccaggtacttctactgaaccgtccgagggcagcgcaccaggtagccctgctggctctccaacctccaccgaagaaggtacctctgaaagcgcaacccctgaatccggcccaggtagcgaaccggcaacctccggttctgaaaccccaggtacttctgaaagcgctactcctgagtccggcccaggtagcccggctggctctccgacttccaccgaggaaggtagcccggctggctctccaacttctactgaagaaggtacttctaccgaaccttccgagggcagcgcaccaggtacttctgaaagcgctacccctgagtccggcccaggtacttctgaaagcgctactcctgaatccggtccaggtacttctgaaagcgctaccccggaatctggcccaggtagcgaaccggctacttctggttctgaaaccccaggtagcgaaccggctacctccggttctgaaactccaggtagcccagcaggctctccgacttccactgaggaaggtacttctactgaaccttccgaaggcagcgcaccaggtacctctactgaaccttctgagggcagcgctccaggtagcgaacctgcaacctctggctctgaaaccccaggtacctctgaaagcgctactcctgaatctggcccaggtacttctactgaaccgtccgagggcagcgcacca

SEQ ID NO: 783 - protein, 1345 aa, Artificial Sequence
  Description of Artificial Sequence: Synthetic polypeptide
GSPAGSPTSTEEGTSESATPESGPGTSTEPSEGSAPGSPAGSPTSTEEGTSTEPSEGSAPGTSTEPSEGSAPGTSESATPESGPGSEPATSGSETPGSEPATSGSETPGSPAGSPTSTEEGTSESATPESGPGTSTEPSEGSAPGTSTEPSEGSAPGSPAGSPTSTEEGTSTEPSEGSAPGTSTEPSEGSAPGTSESATPESGPGTSTEPSEGSAPGTSESATPESGPGSEPATSGSETPGTSTEPSEGSAPGTSTEPSEGSAPGTSESATPESGPGTSESATPESGPGSPAGSPTSTEEGTSESATPESGPGSEPATSGSETPGTSESATPESGPGTSTEPSEGSAPGTSTEPSEGSAPGTSTEPSEGSAPGTSTEPSEGSAPGTSTEPSEGSAPGTSTEPSEGSAPGSPAGSPTSTEEGTSTEPSEGSAPGTSESATPESGPGSEPATSGSETPGTSESATPESGPGSEPATSGSETPGTSESATPESGPGTSTEPSEGSAPGTSESATPESGPGSPAGSPTSTEEGSPAGSPTSTEEGSPAGSPTSTEEGTSESATPESGPGTSTEPSEGSAPGTSESATPESGPGSEPATSGSETPGTSESATPESGPGSEPATSGSETPGTSESATPESGPGTSTEPSEGSAPGSPAGSPTSTEEGTSESATPESGPGSEPATSGSETPGTSESATPESGPGSPAGSPTSTEEGSPAGSPTSTEEGTSTEPSEGSAPGTSESATPESGPGTSESATPESGPGTSESATPESGPGSEPATSGSETPGSEPATSGSETPGSPAGSPTSTEEGTSTEPSEGSAPGTSTEPSEGSAPGSEPATSGSETPGTSESATPESGPGTSTEPSEGSAPGFPTIPLSRLFDNAMLRAHRLHQLAFDTYQEFEEAYIPKEQKYSFLQNPQTSLCFSESIPTPSNREETQQKSNLELLRISLLLIQSWLEPVQFLRSVFANSLVYGASDSNVYDLLKDLEEGIQTLMGRLEDGSPRTGQIFKQTYSKFDTNSHNDDALLKNYGLLYCFRKDMDKVETFLRIVQCRSVEGSCGFGGTSESATPESGPGSEPATSGSETPGTSESATPESGPGSEPATSGSETPGTSESATPESGPGTSTEPSEGSAPGSPAGSPTSTEEGTSESATPESGPGSEPATSGSETPGTSESATPESGPGSPAGSPTSTEEGSPAGSPTSTEEGTSTEPSEGSAPGTSESATPESGPGTSESATPESGPGTSESATPESGPGSEPATSGSETPGSEPATSGSETPGSPAGSPTSTEEGTSTEPSEGSAPGTSTEPSEGSAPGSEPATSGSETPGTSESATPESGPGTSTEPSEGSAP

SEQ ID NO: 784 - DNA, 4038 bp, Artificial Sequence
  Description of Artificial Sequence: Synthetic polynucleotide
ggtagcccggctggctctcctacctctactgaggaaggtacttctgaaagcgctactcctgagtctggtccaggtacctctactgaaccgtccgaaggtagcgctccaggtagcccagcaggctctccgacttccactgaggaaggtacttctactgaaccttccgaaggcagcgcaccaggtacctctactgaaccttctgagggcagcgctccaggtacttctgaaagcgctaccccggaatctggcccaggtagcgaaccggctacttctggttctgaaaccccaggtagcgaaccggctacctccggttctgaaactccaggtagcccggcaggctctccgacctctactgaggaaggtacttctgaaagcgcaaccccggagtccggcccaggtacctctaccgaaccgtctgagggcagcgcaccaggtacttctaccgaaccgtccgagggtagcgcaccaggtagcccagcaggttctcctacctccaccgaggaaggtacttctaccgaaccgtccgagggtagcgcaccaggtacctctactgaaccttctgagggcagcgctccaggtacttctgaaagcgctaccccggagtccggtccaggtacttctactgaaccgtccgaaggtagcgcaccaggtacttctgaaagcgcaacccctgaatccggtccaggtagcgaaccggctacttctggctctgagactccaggtacttctaccgaaccgtccgaaggtagcgcaccaggtacttctactgaaccgtctgaaggtagcgcaccaggtacttctgaaagcgcaaccccggaatccggcccaggtacctctgaaagcgcaaccccggagtccggcccaggtagccctgctggctctccaacctccaccgaagaaggtacctctgaaagcgcaacccctgaatccggcccaggtagcgaaccggcaacctccggttctgaaaccccaggtacctctgaaagcgctactccggagtctggcccaggtacctctactgaaccgtctgagggtagcgctccaggtacttctactgaaccgtccgaaggtagcgcaccaggtacttctaccgaaccgtccgaaggcagcgctccaggtacctctactgaaccttccgagggcagcgctccaggtacctctaccgaaccttctgaaggtagcgcaccaggtacttctaccgaaccgtccgagggtagcgcaccaggtagcccagcaggttctcctacctccaccgaggaaggtacttctaccgaaccgtccgagggtagcgcaccaggtacctctgaaagcgcaactcctgagtctggcccaggtagcgaacctgctacctccggctctgagactccaggtacctctgaaagcgcaaccccggaatctggtccaggtagcgaacctgcaacctctggctctgaaaccccaggtacctctgaaagcgctactcctgaatctggcccaggtacttctactgaaccgtccgagggcagcgcaccaggtacttctgaaagcgctactcctgagtccggcccaggtagcccggctggctctccgacttccaccgaggaaggtagcccggctggctctccaacttctactgaagaaggtagcccggcaggctctccgacctctactgaggaaggtacttctgaaagcgcaaccccggagtccggcccaggtacctctaccgaaccgtctgagggcagcgcaccaggtacctctgaaagcgcaactcctgagtctggcccaggtagcgaacctgctacctccggctctgagactccaggtacctctgaaagcgcaaccccggaatctggtccaggtagcgaacctgcaacctctggctctgaaaccccaggtacctctgaaagcgctactcctgaatctggcccaggtacttctactgaaccgtccgagggcagcgcaccaggtagccctgctggctctccaacctccaccgaagaaggtacctctgaaagcgcaacccctgaatccggcccaggtagcgaaccggcaacctccggttctgaaaccccaggtacttctgaaagcgctactcctgagtccggcccaggtagcccggctggctctccgacttccaccgaggaaggtagcccggctggctctccaacttctactgaagaaggtacttctaccgaaccttccgagggcagcgcaccaggtacttctgaaagcgctacccctgagtccggcccaggtacttctgaaagcgctactcctgaatccggtccaggtacttctgaaagcgctaccccggaatctggcccaggtagcgaaccggctacttctggttctgaaaccccaggtagcgaaccggctacctccggttctgaaactccaggtagcccagcaggctctccgacttccactgaggaaggtacttctactgaaccttccgaaggcagcgcaccaggtacctctactgaaccttctgagggcagcgctccaggtagcgaacctgcaacctctggctctgaaaccccaggtacctctgaaagcgctactcctgaatctggcccaggtacttctactgaaccgtccgagggcagcgcaccaggttttccgactattccgctgtctcgtctgtttgataatgctatgctgcgtgcgcaccgtctgcaccagctggcctttgatacttaccaggaatttgaagaagcctacattcctaaagagcagaagtactctttcctgcaaaacccacagacttctctctgcttcagcgaatctattccgacgccttccaatcgcgaggaaactcagcaaaagtccaatctggaactactccgcatttctctgcttctgattcagagctggctagaaccagtgcaatttctgcgttccgtcttcgccaatagcctagtttatggcgcatccgacagcaacgtatacgatctcctgaaagatctcgaggaaggcattcagaccctgatgggtcgtctcgaggatggctctccgcgtactggtcagatcttcaagcagacttactctaaatttgatactaacagccacaatgacgatgcgcttctaaaaaactatggtctgctgtattgttttcgtaaagatatggacaaagttgaaaccttcctgcgtattgttcagtgtcgttccgttgagggcagctgtggtttctaaggtggtacctctgaaagcgcaactcctgagtctggcccaggtagcgaacctgctacctccggctctgagactccaggtacctctgaaagcgcaaccccggaatctggtccaggtagcgaacctgcaacctctggctctgaaaccccaggtacctctgaaagcgctactcctgaatctggcccaggtacttctactgaaccgtccgagggcagcgcaccaggtagccctgctggctctccaacctccaccgaagaaggtacctctgaaagcgcaacccctgaatccggcccaggtagcgaaccggcaacctccggttctgaaaccccaggtacttctgaaagcgctactcctgagtccggcccaggtagcccggctggctctccgacttccaccgaggaaggtagcccggctggctctccaacttctactgaagaaggtacttctaccgaaccttccgagggcagcgcaccaggtacttctgaaagcgctacccctgagtccggcccaggtacttctgaaagcgctactcctgaatccggtccaggtacttctgaaagcgctaccccggaatctggcccaggtagcgaaccggctacttctggttctgaaaccccaggtagcgaaccggctacctccggttctgaaactccaggtagcccagcaggctctccgacttccactgaggaaggtacttctactgaaccttccgaaggcagcgcaccaggtacctctactgaaccttctgagggcagcgctccaggtagcgaacctgcaacctctggctctgaaaccccaggtacctctgaaagcgctactcctgaatctggcccaggtacttctactgaaccgtccgagggcagcgcacca

SEQ ID NO: 785 - protein, 1356 aa, Artificial Sequence
  Description of Artificial Sequence: Synthetic polypeptide
  MOD_RES (430)..(432): Any amino acid
  MOD_RES (443)..(446): Any amino acid
GSTSESPSGTAPGTSPSGESSTAPGSTSESPSGTAPGSTSESPSGTAPGTSTPESGSASPGTSTPESGSASPGSTSESPSGTAPGSTSESPSGTAPGTSPSGESSTAPGSTSESPSGTAPGTSPSGESSTAPGTSPSGESSTAPGSTSSTAESPGPGTSPSGESSTAPGTSPSGESSTAPGSTSSTAESPGPGTSTPESGSASPGTSTPESGSASPGSTSESPSGTAPGSTSESPSGTAPGTSTPESGSASPGSTSSTAESPGPGTSTPESGSASPGSTSESPSGTAPGTSPSGESSTAPGSTSSTAESPGPGTSPSGESSTAPGTSTPESGSASPGSTSSTAESPGPGSTSSTAESPGPGSTSSTAESPGPGSTSSTAESPGPGTSPSGESSTAPGSTSESPSGTAPGSTSESPSGTAPGTSTPESGPXXXGASASGAPSTXXXXSESPSGTAPGSTSESPSGTAPGSTSESPSGTAPGSTSESPSGTAPGSTSESPSGTAPGSTSESPSGTAPGTSTPESGSASPGTSPSGESSTAPGTSPSGESSTAPGSTSSTAESPGPGTSPSGESSTAPGTSTPESGSASPGSTSESPSGTAPGSTSESPSGTAPGTSPSGESSTAPGSTSESPSGTAPGTSTPESGSASPGTSTPESGSASPGSTSESPSGTAPGTSTPESGSASPGSTSSTAESPGPGSTSESPSGTAPGSTSESPSGTAPGTSPSGESSTAPGSTSSTAESPGPGTSPSGESSTAPGTSTPESGSASPGTSPSGESSTAPGTSPSGESSTAPGTSPSGESSTAPGSTSSTAESPGPGSTSSTAESPGPGTSPSGESSTAPGSSPSASTGTGPGSSTPSGATGSPGSSTPSGATGSPGFPTIPLSRLFDNAMLRAHRLHQLAFDTYQEFEEAYIPKEQKYSFLQNPQTSLCFSESIPTPSNREETQQKSNLELLRISLLLIQSWLEPVQFLRSVFANSLVYGASDSNVYDLLKDLEEGIQTLMGRLEDGSPRTGQIFKQTYSKFDTNSHNDDALLKNYGLLYCFRKDMDKVETFLRIVQCRSVEGSCGFGGTSESATPESGPGSEPATSGSETPGTSESATPESGPGSEPATSGSETPGTSESATPESGPGTSTEPSEGSAPGSPAGSPTSTEEGTSESATPESGPGSEPATSGSETPGTSESATPESGPGSPAGSPTSTEEGSPAGSPTSTEEGTSTEPSEGSAPGTSESATPESGPGTSESATPESGPGTSESATPESGPGSEPATSGSETPGSEPATSGSETPGSPAGSPTSTEEGTSTEPSEGSAPGTSTEPSEGSAPGSEPATSGSETPGTSESATPESGPGTSTEPSEGSAP

SEQ ID NO: 786 - DNA, 4071 bp, Artificial Sequence
  Description of Artificial Sequence: Synthetic polynucleotide
  modified_base (1287)..(1298): a, c, t, g, unknown or other
  modified_base (1330)..(1337): a, c, t, g, unknown or other
ggttctaccagcgaatctccttctggcaccgctccaggtacctctcctagcggcgaatcttctaccgctccaggttctactagcgaatctccttctggcactgcaccaggttctactagcgaatccccgtctggtactgctccaggtacttctactcctgaaagcggttccgcttctccaggtacctctactccggaaagcggttctgcatctccaggttctaccagcgaatctccttctggcaccgctccaggttctactagcgaatccccgtctggtaccgcaccaggtacttctcctagcggcgaatcttctaccgcaccaggttctactagcgaatctccgtctggcactgctccaggtacttctcctagcggtgaatcttctaccgctccaggtacttcccctagcggcgaatcttctaccgctccaggttctactagctctactgcagaatctccgggcccaggtacctctcctagcggtgaatcttctaccgctccaggtacttctccgagcggtgaatcttctaccgctccaggttctactagctctactgcagaatctcctggcccaggtacctctactccggaaagcggctctgcatctccaggtacttctacccctgaaagcggttctgcatctccaggttctactagcgaatctccttctggcactgcaccaggttctaccagcgaatctccgtctggcactgcaccaggtacctctacccctgaaagcggttccgcttctccaggttctaccagctctaccgcagaatctcctggtccaggtacctctactccggaaagcggctctgcatctccaggttctactagcgaatctccttctggcactgcaccaggtacttctccgagcggtgaatcttctaccgcaccaggttctactagctctaccgctgaatctccgggcccaggtacttctccgagcggtgaatcttctactgctccaggtacctctactcctgaaagcggttctgcatctccaggttccactagctctaccgcagaatctccgggcccaggttctactagctctactgctgaatctcctggcccaggttctactagctctactgctgaatctccgggtccaggttctaccagctctactgctgaatctcctggtccaggtacctccccgagcggtgaatcttctactgcaccaggttctactagcgaatctccttctggcactgcaccaggttctaccagcgaatctccgtctggcactgcaccaggtacctctacccctgaaagcggtccnnnnnnnnnnnntgcaagcgcaagcggcgcgccaagcacgggannnnnnnntagcgaatctccttctggtaccgctccaggttctaccagcgaatccccgtctggtactgctccaggttctaccagcgaatctccttctggtactgcaccaggttctactagcgaatctccttctggtaccgctccaggttctaccagcgaatccccgtctggtactgctccaggttctaccagcgaatctccttctggtactgcaccaggtacttctactccggaaagcggttccgcatctccaggtacttctcctagcggtgaatcttctactgctccaggtacctctcctagcggcgaatcttctactgctccaggttctaccagctctactgctgaatctccgggtccaggtacttccccgagcggtgaatcttctactgcaccaggtacttctactccggaaagcggttccgcttctccaggttctaccagcgaatctccttctggcaccgctccaggttctactagcgaatccccgtctggtaccgcaccaggtacttctcctagcggcgaatcttctaccgcaccaggttctactagcgaatccccgtctggtaccgcaccaggtacttctaccccggaaagcggctctgcttctccaggtacttctaccccggaaagcggctccgcatctccaggttctactagcgaatctccttctggtaccgctccaggtacttctacccctgaaagcggctccgcttctccaggttccactagctctaccgctgaatctccgggtccaggttctaccagcgaatctccttctggcaccgctccaggttctactagcgaatccccgtctggtaccgcaccaggtacttctcctagcggcgaatcttctaccgcaccaggttctaccagctctactgctgaatctccgggtccaggtacttccccgagcggtgaatcttctactgcaccaggtacttctactccggaaagcggttccgcttctccaggtacctcccctagcggcgaatcttctactgctccaggtacctctcctagcggcgaatcttctaccgctccaggtacctcccctagcggtgaatcttctaccgcaccaggttctactagctctactgctgaatctccgggtccaggttctaccagctctactgctgaatctcctggtccaggtacctccccgagcggtgaatcttctactgcaccaggttctagcccttctgcttccaccggtaccggcccaggtagctctactccgtctggtgcaactggctctccaggtagctctactccgtctggtgcaaccggctccccaggttttccgactattccgctgtctcgtctgtttgataatgctatgctgcgtgcgcaccgtctgcaccagctggcctttgatacttaccaggaatttgaagaagcctacattcctaaagagcagaagtactctttcctgcaaaacccacagacttctctctgcttcagcgaatctattccgacgccttccaatcgcgaggaaactcagcaaaagtccaatctggaactactccgcatttctctgcttctgattcagagctggctagaaccagtgcaatttctgcgttccgtcttcgccaatagcctagtttatggcgcatccgacagcaacgtatacgatctcctgaaagatctcgaggaaggcattcagaccctgatgggtcgtctcgaggatggctctccgcgtactggtcagatcttcaagcagacttactctaaatttgatactaacagccacaatgacgatgcgcttctaaaaaactatggtctgctgtattgttttcgtaaagatatggacaaagttgaaaccttcctgcgtattgttcagtgtcgttccgttgagggcagctgtggtttctaaggtggtacctctgaaagcgcaactcctgagtctggcccaggtagcgaacctgctacctccggctctgagactccaggtacctctgaaagcgcaaccccggaatctggtccaggtagcgaacctgcaacctctggctctgaaaccccaggtacctctgaaagcgctactcctgaatctggcccaggtacttctactgaaccgtccgagggcagcgcaccaggtagccctgctggctctccaacctccaccgaagaaggtacctctgaaagcgcaacccctgaatccggcccaggtagcgaaccggcaacctccggttctgaaaccccaggtacttctgaaagcgctactcctgagtccggcccaggtagcccggctggctctccgacttccaccgaggaaggtagcccggctggctctccaacttctactgaagaaggtacttctaccgaaccttccgagggcagcgcaccaggtacttctgaaagcgctacccctgagtccggcccaggtacttctgaaagcgctactcctgaatccggtccaggtacttctgaaagcgctaccccggaatctggcccaggtagcgaaccggctacttctggttctgaaaccccaggtagcgaaccggctacctccggttctgaaactccaggtagcccagcaggctctccgacttccactgaggaaggtacttctactgaaccttccgaaggcagcgcaccaggtacctctactgaaccttctgagggcagcgctccaggtagcgaacctgcaacctctggctctgaaaccccaggtacctctgaaagcgctactcctgaatctggcccaggtacttctactgaaccgtccgagggcagcgcacca

SEQ ID NO: 787 - protein, 1345 aa, Artificial Sequence
  Description of Artificial Sequence: Synthetic polypeptide
GASPGTSSTGSPGSSPSASTGTGPGSSPSASTGTGPGTPGSGTASSSPGSSTPSGATGSPGSNPSASTGTGPGASPGTSSTGSPGTPGSGTASSSPGSSTPSGATGSPGTPGSGTASSSPGASPGTSSTGSPGASPGTSSTGSPGTPGSGTASSSPGSSTPSGATGSPGASPGTSSTGSPGTPGSGTASSSPGSSTPSGATGSPGSNPSASTGTGPGSSPSASTGTGPGSSTPSGATGSPGSSTPSGATGSPGASPGTSSTGSPGASPGTSSTGSPGASPGTSSTGSPGTPGSGTASSSPGASPGTSSTGSPGASPGTSSTGSPGASPGTSSTGSPGSSPSASTGTGPGTPGSGTASSSPGASPGTSSTGSPGASPGTSSTGSPGASPGTSSTGSPGSSTPSGATGSPGSSTPSGATGSPGASPGTSSTGSPGTPGSGTASSSPGSSTPSGATGSPGSSTPSGATGSPGSSTPSGATGSPGSSPSASTGTGPGASPGTSSTGSPGASPGTSSTGSPGTPGSGTASSSPGASPGTSSTGSPGASPGTSSTGSPGASPGTSSTGSPGASPGTSSTGSPGTPGSGTASSSPGSSTPSGATGSPGTPGSGTASSSPGSSTPSGATGSPGTPGSGTASSSPGSSTPSGATGSPGSSTPSGATGSPGSSPSASTGTGPGSSPSASTGTGPGASPGTSSTGSPGTPGSGTASSSPGSSTPSGATGSPGSSPSASTGTGPGSSPSASTGTGPGASPGTSSTGSPGASPGTSSTGSPGSSTPSGATGSPGSSPSASTGTGPGASPGTSSTGSPGSSPSASTGTGPGTPGSGTASSSPGSSTPSGATGSPGSSTPSGATGSPGASPGTSSTGSPGFPTIPLSRLFDNAMLRAHRLHQLAFDTYQEFEEAYIPKEQKYSFLQNPQTSLCFSESIPTPSNREETQQKSNLELLRISLLLIQSWLEPVQFLRSVFANSLVYGASDSNVYDLLKDLEEGIQTLMGRLEDGSPRTGQIFKQTYSKFDTNSHNDDALLKNYGLLYCFRKDMDKVETFLRIVQCRSVEGSCGFGGTSESATPESGPGSEPATSGSETPGTSESATPESGPGSEPATSGSETPGTSESATPESGPGTSTEPSEGSAPGSPAGSPTSTEEGTSESATPESGPGSEPATSGSETPGTSESATPESGPGSPAGSPTSTEEGSPAGSPTSTEEGTSTEPSEGSAPGTSESATPESGPGTSESATPESGPGTSESATPESGPGSEPATSGSETPGSEPATSGSETPGSPAGSPTSTEEGTSTEPSEGSAPGTSTEPSEGSAPGSEPATSGSETPGTSESATPESGPGTSTEPSEGSAP

SEQ ID NO: 788 - DNA, 4038 bp, Artificial Sequence
  Description of Artificial Sequence: Synthetic polynucleotide
ggtgcttccccgggcaccagctctactggttctccaggttctagcccgtctgcttctactggtactggtccaggttctagcccttctgcttccactggtactggtccaggtaccccgggtagcggtaccgcttcttcttctccaggtagctctactccgtctggtgctaccggctctccaggttctaacccttctgcatccaccggtaccggcccaggtgcttctccgggcaccagctctactggttctccaggtaccccgggcagcggtaccgcatcttcttctccaggtagctctactccttctggtgcaactggttctccaggtactcctggcagcggtaccgcttcttcttctccaggtgcttctcctggtactagctctactggttctccaggtgcttctccgggcactagctctactggttctccaggtaccccgggtagcggtactgcttcttcctctccaggtagctctaccccttctggtgcaaccggctctccaggtgcttctccgggcaccagctctaccggttctccaggtaccccgggtagcggtaccgcttcttcttctccaggtagctctactccgtctggtgctaccggctctccaggttctaacccttctgcatccaccggtaccggcccaggttctagcccttctgcttccaccggtactggcccaggtagctctaccccttctggtgctaccggctccccaggtagctctactccttctggtgcaactggctctccaggtgcatctccgggcactagctctactggttctccaggtgcatcccctggcactagctctactggttctccaggtgcttctcctggtaccagctctactggttctccaggtactcctggcagcggtaccgcttcttcttctccaggtgcttctcctggtactagctctactggttctccaggtgcttctccgggcactagctctactggttctccaggtgcttccccgggcactagctctaccggttctccaggttctagcccttctgcatctactggtactggcccaggtactccgggcagcggtactgcttcttcctctccaggtgcatctccgggcactagctctactggttctccaggtgcatcccctggcactagctctactggttctccaggtgcttctcctggtaccagctctactggttctccaggtagctctactccgtctggtgcaaccggttccccaggtagctctactccttctggtgctactggctccccaggtgcatcccctggcaccagctctaccggttctccaggtaccccgggcagcggtaccgcatcttcctctccaggtagctctaccccgtctggtgctaccggttccccaggtagctctaccccgtctggtgcaaccggctccccaggtagctctactccgtctggtgcaaccggctccccaggttctagcccgtctgcttccactggtactggcccaggtgcttccccgggcaccagctctactggttctccaggtgcatccccgggtaccagctctaccggttctccaggtactcctggcagcggtactgcatcttcctctccaggtgcttctccgggcaccagctctactggttctccaggtgcatctccgggcactagctctactggttctccaggtgcatcccctggcactagctctactggttctccaggtgcttctcctggtaccagctctactggttctccaggtacccctggtagcggtactgcttcttcctctccaggtagctctactccgtctggtgctaccggttctccaggtaccccgggtagcggtaccgcatcttcttctccaggtagctctaccccgtctggtgctactggttctccaggtactccgggcagcggtactgcttcttcctctccaggtagctctaccccttctggtgctactggctctccaggtagctctaccccgtctggtgctactggctccccaggttctagcccttctgcatccaccggtaccggtccaggttctagcccgtctgcatctactggtactggtccaggtgcatccccgggcactagctctaccggttctccaggtactcctggtagcggtactgcttcttcttctccaggtagctctactccttctggtgctactggttctccaggttctagcccttctgcatccaccggtaccggcccaggttctagcccgtctgcttctaccggtactggtccaggtgcttctccgggtactagctctactggttctccaggtgcatctcctggtactagctctactggttctccaggtagctctactccgtctggtgcaaccggctctccaggttctagcccttctgcatctaccggtactggtccaggtgcatcccctggtaccagctctaccggttctccaggttctagcccttctgcttctaccggtaccggtccaggtacccctggcagcggtaccgcatcttcctctccaggtagctctactccgtctggtgcaaccggttccccaggtagctctactccttctggtgctactggctccccaggtgcatcccctggcaccagctctaccggttctccaggttttccgactattccgctgtctcgtctgtttgataatgctatgctgcgtgcgcaccgtctgcaccagctggcctttgatacttaccaggaatttgaagaagcctacattcctaaagagcagaagtactctttcctgcaaaacccacagacttctctctgcttcagcgaatctattccgacgccttccaatcgcgaggaaactcagcaaaagtccaatctggaactactccgcatttctctgcttctgattcagagctggctagaaccagtgcaatttctgcgttccgtcttcgccaatagcctagtttatggcgcatccgacagcaacgtatacgatctcctgaaagatctcgaggaaggcattcagaccctgatgggtcgtctcgaggatggctctccgcgtactggtcagatcttcaagcagacttactctaaatttgatactaacagccacaatgacgatgcgcttctaaaaaactatggtctgctgtattgttttcgtaaagatatggacaaagttgaaaccttcctgcgtattgttcagtgtcgttccgttgagggcagctgtggtttctaaggtggtacctctgaaagcgcaactcctgagtctggcccaggtagcgaacctgctacctccggctctgagactccaggtacctctgaaagcgcaaccccggaatctggtccaggtagcgaacctgcaacctctggctctgaaaccccaggtacctctgaaagcgctactcctgaatctggcccaggtacttctactgaaccgtccgagggcagcgcaccaggtagccctgctggctctccaacctccaccgaagaaggtacctctgaaagcgcaacccctgaatccggcccaggtagcgaaccggcaacctccggttctgaaaccccaggtacttctgaaagcgctactcctgagtccggcccaggtagcccggctggctctccgacttccaccgaggaaggtagcccggctggctctccaacttctactgaagaaggtacttctaccgaaccttccgagggcagcgcaccaggtacttctgaaagcgctacccctgagtccggcccaggtacttctgaaagcgctactcctgaatccggtccaggtacttctgaaagcgctaccccggaatctggcccaggtagcgaaccggctacttctggttctgaaaccccaggtagcgaaccggctacctccggttctgaaactccaggtagcccagcaggctctccgacttccactgaggaaggtacttctactgaaccttccgaaggcagcgcaccaggtacctctactgaaccttctgagggcagcgctccaggtagcgaacctgcaacctctggctctgaaaccccaggtacctctgaaagcgctactcctgaatctggcccaggtacttctactgaaccgtccgagggcagcgcacca

SEQ ID NO: 789 - protein, 1356 aa, Artificial Sequence
  Description of Artificial Sequence: Synthetic polypeptide
GTSTEPSEGSAPGSEPATSGSETPGSPAGSPTSTEEGSTSSTAESPGPGTSTPESGSASPGSTSESPSGTAPGSTSESPSGTAPGTSTPESGSASPGTSTPESGSASPGSEPATSGSETPGTSESATPESGPGSPAGSPTSTEEGTSTEPSEGSAPGTSESATPESGPGTSTEPSEGSAPGTSTEPSEGSAPGSPAGSPTSTEEGTSTEPSEGSAPGTSTEPSEGSAPGTSESATPESGPGTSESATPESGPGTSTEPSEGSAPGTSTEPSEGSAPGTSESATPESGPGTSTEPSEGSAPGSEPATSGSETPGSPAGSPTSTEEGSSTPSGATGSPGTPGSGTASSSPGSSTPSGATGSPGTSTEPSEGSAPGTSTEPSEGSAPGSEPATSGSETPGSPAGSPTSTEEGSPAGSPTSTEEGTSTEPSEGSAPGASASGAPSTGGTSESATPESGPGSPAGSPTSTEEGSPAGSPTSTEEGSTSSTAESPGPGSTSESPSGTAPGTSPSGESSTAPGTPGSGTASSSPGSSTPSGATGSPGSSPSASTGTGPGSEPATSGSETPGTSESATPESGPGSEPATSGSETPGSTSSTAESPGPGSTSSTAESPGPGTSPSGESSTAPGSEPATSGSETPGSEPATSGSETPGTSTEPSEGSAPGSTSSTAESPGPGTSTPESGSASPGSTSESPSGTAPGTSTEPSEGSAPGTSTEPSEGSAPGTSTEPSEGSAPGSSTPSGATGSPGSSPSASTGTGPGASPGTSSTGSPGSEPATSGSETPGTSESATPESGPGSPAGSPTSTEEGSSTPSGATGSPGSSPSASTGTGPGASPGTSSTGSPGTSESATPESGPGTSTEPSEGSAPGTSTEPSEGSAPGFPTIPLSRLFDNAMLRAHRLHQLAFDTYQEFEEAYIPKEQKYSFLQNPQTSLCFSESIPTPSNREETQQKSNLELLRISLLLIQSWLEPVQFLRSVFANSLVYGASDSNVYDLLKDLEEGIQTLMGRLEDGSPRTGQIFKQTYSKFDTNSHNDDALLKNYGLLYCFRKDMDKVETFLRIVQCRSVEGSCGFGGTSESATPESGPGSEPATSGSETPGTSESATPESGPGSEPATSGSETPGTSESATPESGPGTSTEPSEGSAPGSPAGSPTSTEEGTSESATPESGPGSEPATSGSETPGTSESATPESGPGSPAGSPTSTEEGSPAGSPTSTEEGTSTEPSEGSAPGTSESATPESGPGTSESATPESGPGTSESATPESGPGSEPATSGSETPGSEPATSGSETPGSPAGSPTSTEEGTSTEPSEGSAPGTSTEPSEGSAPGSEPATSGSETPGTSESATPESGPGTSTEPSEGSAP

SEQ ID NO: 790 - DNA, 4071 bp, Artificial Sequence
  Description of Artificial Sequence: Synthetic polynucleotide
ggtacttctactgaaccgtctgaaggcagcgcaccaggtagcgaaccggctacttccggttctgaaaccccaggtagcccagcaggttctccaacttctactgaagaaggttctaccagctctaccgcagaatctcctggtccaggtacctctactccggaaagcggctctgcatctccaggttctactagcgaatctccttctggcactgcaccaggttctactagcgaatccccgtctggtactgctccaggtacttctactcctgaaagcggttccgcttctccaggtacctctactccggaaagcggttctgcatctccaggtagcgaaccggcaacctccggctctgaaaccccaggtacctctgaaagcgctactcctgaatccggcccaggtagcccggcaggttctccgacttccactgaggaaggtacctctactgaaccttctgagggcagcgctccaggtacttctgaaagcgctaccccggagtccggtccaggtacttctactgaaccgtccgaaggtagcgcaccaggtacttctaccgaaccgtccgagggtagcgcaccaggtagcccagcaggttctcctacctccaccgaggaaggtacttctaccgaaccgtccgagggtagcgcaccaggtacttctaccgaaccttccgagggcagcgcaccaggtacttctgaaagcgctacccctgagtccggcccaggtacttctgaaagcgctactcctgaatccggtccaggtacctctactgaaccttccgaaggcagcgctccaggtacctctaccgaaccgtccgagggcagcgcaccaggtacttctgaaagcgcaacccctgaatccggtccaggtacttctactgaaccttccgaaggtagcgctccaggtagcgaacctgctacttctggttctgaaaccccaggtagcccggctggctctccgacctccaccgaggaaggtagctctaccccgtctggtgctactggttctccaggtactccgggcagcggtactgcttcttcctctccaggtagctctaccccttctggtgctactggctctccaggtacctctaccgaaccgtccgagggtagcgcaccaggtacctctactgaaccgtctgagggtagcgctccaggtagcgaaccggcaacctccggttctgaaactccaggtagccctgctggctctccgacttctactgaggaaggtagcccggctggttctccgacttctactgaggaaggtacttctaccgaaccttccgaaggtagcgctccaggtgcaagcgcaagcggcgcgccaagcacgggaggtacttctgaaagcgctactcctgagtccggcccaggtagcccggctggctctccgacttccaccgaggaaggtagcccggctggctctccaacttctactgaagaaggttctaccagctctaccgctgaatctcctggcccaggttctactagcgaatctccgtctggcaccgcaccaggtacttcccctagcggtgaatcttctactgcaccaggtacccctggcagcggtaccgcttcttcctctccaggtagctctaccccgtctggtgctactggctctccaggttctagcccgtctgcatctaccggtaccggcccaggtagcgaaccggcaacctccggctctgaaactccaggtacttctgaaagcgctactccggaatccggcccaggtagcgaaccggctacttccggctctgaaaccccaggttccaccagctctactgcagaatctccgggcccaggttctactagctctactgcagaatctccgggtccaggtacttctcctagcggcgaatcttctaccgctccaggtagcgaaccggcaacctctggctctgaaactccaggtagcgaacctgcaacctccggctctgaaaccccaggtacttctactgaaccttctgagggcagcgcaccaggttctaccagctctaccgcagaatctcctggtccaggtacctctactccggaaagcggctctgcatctccaggttctactagcgaatctccttctggcactgcaccaggtacttctaccgaaccgtccgaaggcagcgctccaggtacctctactgaaccttccgagggcagcgctccaggtacctctaccgaaccttctgaaggtagcgcaccaggtagctctactccgtctggtgcaaccggctccccaggttctagcccgtctgcttccactggtactggcccaggtgcttccccgggcaccagctctactggttctccaggtagcgaacctgctacctccggttctgaaaccccaggtacctctgaaagcgcaactccggagtctggtccaggtagccctgcaggttctcctacctccactgaggaaggtagctctactccgtctggtgcaaccggctccccaggttctagcccgtctgcttccactggtactggcccaggtgcttccccgggcaccagctctactggttctccaggtacctctgaaagcgctactccggagtctggcccaggtacctctactgaaccgtctgagggtagcgctccaggtacttctactgaaccgtccgaaggtagcgcaccaggttttccgactattccgctgtctcgtctgtttgataatgctatgctgcgtgcgcaccgtctgcaccagctggcctttgatacttaccaggaatttgaagaagcctacattcctaaagagcagaagtactctttcctgcaaaacccacagacttctctctgcttcagcgaatctattccgacgccttccaatcgcgaggaaactcagcaaaagtccaatctggaactactccgcatttctctgcttctgattcagagctggctagaaccagtgcaatttctgcgttccgtcttcgccaatagcctagtttatggcgcatccgacagcaacgtatacgatctcctgaaagatctcgaggaaggcattcagaccctgatgggtcgtctcgaggatggctctccgcgtactggtcagatcttcaagcagacttactctaaatttgatactaacagccacaatgacgatgcgcttctaaaaaactatggtctgctgtattgttttcgtaaagatatggacaaagttgaaaccttcctgcgtattgttcagtgtcgttccgttgagggcagctgtggtttctaaggtggtacctctgaaagcgcaactcctgagtctggcccaggtagcgaacctgctacctccggctctgagactccaggtacctctgaaagcgcaaccccggaatctggtccaggtagcgaacctgcaacctctggctctgaaaccccaggtacctctgaaagcgctactcctgaatctggcccaggtacttctactgaaccgtccgagggcagcgcaccaggtagccctgctggctctccaacctccaccgaagaaggtacctctgaaagcgcaacccctgaatccggcccaggtagcgaaccggcaacctccggttctgaaaccccaggtacttctgaaagcgctactcctgagtccggcccaggtagcccggctggctctccgacttccaccgaggaaggtagcccggctggctctccaacttctactgaagaaggtacttctaccgaaccttccgagggcagcgcaccaggtacttctgaaagcgctacccctgagtccggcccaggtacttctgaaagcgctactcctgaatccggtccaggtacttctgaaagcgctaccccggaatctggcccaggtagcgaaccggctacttctggttctgaaaccccaggtagcgaaccggctacctccggttctgaaactccaggtagcccagcaggctctccgacttccactgaggaaggtacttctactgaaccttccgaaggcagcgcaccaggtacctctactgaaccttctgagggcagcgctccaggtagcgaacctgcaacctctggctctgaaaccccaggtacctctgaaagcgctactcctgaatctggcccaggtacttctactgaaccgtccgagggcagcgcacca

SEQ ID NO: 791 - protein, 1394 aa, Artificial Sequence
  Description of Artificial Sequence: Synthetic polypeptide
MAEPAGSPTSTEEGTPGSGTASSSPGSSTPSGATGSPGASPGTSSTGSPGSPAGSPTSTEEGTSESATPESGPGTSTEPSEGSAPGSPAGSPTSTEEGTSTEPSEGSAPGTSTEPSEGSAPGTSESATPESGPGSEPATSGSETPGSEPATSGSETPGSPAGSPTSTEEGTSESATPESGPGTSTEPSEGSAPGTSTEPSEGSAPGSPAGSPTSTEEGTSTEPSEGSAPGTSTEPSEGSAPGTSESATPESGPGTSTEPSEGSAPGTSESATPESGPGSEPATSGSETPGTSTEPSEGSAPGTSTEPSEGSAPGTSESATPESGPGTSESATPESGPGSPAGSPTSTEEGTSESATPESGPGSEPATSGSETPGTSESATPESGPGTSTEPSEGSAPGTSTEPSEGSAPGTSTEPSEGSAPGTSTEPSEGSAPGTSTEPSEGSAPGTSTEPSEGSAPGSPAGSPTSTEEGTSTEPSEGSAPGTSESATPESGPGSEPATSGSETPGTSESATPESGPGSEPATSGSETPGTSESATPESGPGTSTEPSEGSAPGTSESATPESGPGSPAGSPTSTEEGSPAGSPTSTEEGSPAGSPTSTEEGTSESATPESGPGTSTEPSEGSAPGTSESATPESGPGSEPATSGSETPGTSESATPESGPGSEPATSGSETPGTSESATPESGPGTSTEPSEGSAPGSPAGSPTSTEEGTSESATPESGPGSEPATSGSETPGTSESATPESGPGSPAGSPTSTEEGSPAGSPTSTEEGTSTEPSEGSAPGTSESATPESGPGTSESATPESGPGTSESATPESGPGSEPATSGSETPGSEPATSGSETPGSPAGSPTSTEEGTSTEPSEGSAPGTSTEPSEGSAPGSEPATSGSETPGTSESATPESGPGTSTEPSEGSAPGFPTIPLSRLFDNAMLRAHRLHQLAFDTYQEFEEAYIPKEQKYSFLQNPQTSLCFSESIPTPSNREETQQKSNLELLRISLLLIQSWLEPVQFLRSVFANSLVYGASDSNVYDLLKDLEEGIQTLMGRLEDGSPRTGQIFKQTYSKFDTNSHNDDALLKNYGLLYCFRKDMDKVETFLRIVQCRSVEGSCGFGGTSESATPESGPGSEPATSGSETPGTSESATPESGPGSEPATSGSETPGTSESATPESGPGTSTEPSEGSAPGSPAGSPTSTEEGTSESATPESGPGSEPATSGSETPGTSESATPESGPGSPAGSPTSTEEGSPAGSPTSTEEGTSTEPSEGSAPGTSESATPESGPGTSESATPESGPGTSESATPESGPGSEPATSGSETPGSEPATSGSETPGSPAGSPTSTEEGTSTEPSEGSAPGTSTEPSEGSAPGSEPATSGSETPGTSESATPESGPGTSTEPSEGSAP

SEQ ID NO: 792 - DNA, 4185 bp, Artificial Sequence
  Description of Artificial Sequence: Synthetic polynucleotide
atggctgaacctgctggctctccaacctccactgaggaaggtaccccgggtagcggtactgcttcttcctctccaggtagctctaccccttctggtgcaaccggctctccaggtgcttctccgggcaccagctctaccggttctccaggtagcccggctggctctcctacctctactgaggaaggtacttctgaaagcgctactcctgagtctggtccaggtacctctactgaaccgtccgaaggtagcgctccaggtagcccagcaggctctccgacttccactgaggaaggtacttctactgaaccttccgaaggcagcgcaccaggtacctctactgaaccttctgagggcagcgctccaggtacttctgaaagcgctaccccggaatctggcccaggtagcgaaccggctacttctggttctgaaaccccaggtagcgaaccggctacctccggttctgaaactccaggtagcccggcaggctctccgacctctactgaggaaggtacttctgaaagcgcaaccccggagtccggcccaggtacctctaccgaaccgtctgagggcagcgcaccaggtacttctaccgaaccgtccgagggtagcgcaccaggtagcccagcaggttctcctacctccaccgaggaaggtacttctaccgaaccgtccgagggtagcgcaccaggtacctctactgaaccttctgagggcagcgctccaggtacttctgaaagcgctaccccggagtccggtccaggtacttctactgaaccgtccgaaggtagcgcaccaggtacttctgaaagcgcaacccctgaatccggtccaggtagcgaaccggctacttctggctctgagactccaggtacttctaccgaaccgtccgaaggtagcgcaccaggtacttctactgaaccgtctgaaggtagcgcaccaggtacttctgaaagcgcaaccccggaatccggcccaggtacctctgaaagcgcaaccccggagtccggcccaggtagccctgctggctctccaacctccaccgaagaaggtacctctgaaagcgcaacccctgaatccggcccaggtagcgaaccggcaacctccggttctgaaaccccaggtacctctgaaagcgctactccggagtctggcccaggtacctctactgaaccgtctgagggtagcgctccaggtacttctactgaaccgtccgaaggtagcgcaccaggtacttctaccgaaccgtccgaaggcagcgctccaggtacctctactgaaccttccgagggcagcgctccaggtacctctaccgaaccttctgaaggtagcgcaccaggtacttctaccgaaccgtccgagggtagcgcaccaggtagcccagcaggttctcctacctccaccgaggaaggtacttctaccgaaccgtccgagggtagcgcaccaggtacctctgaaagcgcaactcctgagtctggcccaggtagcgaacctgctacctccggctctgagactccaggtacctctgaaagcgcaaccccggaatctggtccaggtagcgaacctgcaacctctggctctgaaaccccaggtacctctgaaagcgctactcctgaatctggcccaggtacttctactgaaccgtccgagggcagcgcaccaggtacttctgaaagcgctactcctgagtccggcccaggtagcccggctggctctccgacttccaccgaggaaggtagcccggctggctctccaacttctactgaagaaggtagcccggcaggctctccgacctctactgaggaaggtacttctgaaagcgcaaccccggagtccggcccaggtacctctaccgaaccgtctgagggcagcgcaccaggtacctctgaaagcgcaactcctgagtctggcccaggtagcgaacctgctacctccggctctgagactccaggtacctctgaaagcgcaaccccggaatctggtccaggtagcgaacctgcaacctctggctctgaaaccccaggtacctctgaaagcgctactcctgaatctggcccaggtacttctactgaaccgtccgagggcagcgcaccaggtagccctgctggctctccaacctccaccgaagaaggtacctctgaaagcgcaacccctgaatccggcccaggtagcgaaccggcaacctccggttctgaaaccccaggtacttctgaaagcgctactcctgagtccggcccaggtagcccggctggctctccgacttccaccgaggaaggtagcccggctggctctccaacttctactgaagaaggtacttctaccgaaccttccgagggcagcgcaccaggtacttctgaaagcgctacccctgagtccggcccaggtacttctgaaagcgctactcctgaatccggtccaggtacttctgaaagcgctaccccggaatctggcccaggtagcgaaccggctacttctggttctgaaaccccaggtagcgaaccggctacctccggttctgaaactccaggtagcccagcaggctctccgacttccactgaggaaggtacttctactgaaccttccgaaggcagcgcaccaggtacctctactgaaccttctgagggcagcgctccaggtagcgaacctgcaacctctggctctgaaaccccaggtacctctgaaagcgctactcctgaatctggcccaggtacttctactgaaccgtccgagggcagcgcaccaggttttccgactattccgctgtctcgtctgtttgataatgctatgctgcgtgcgcaccgtctgcaccagctggcctttgatacttaccaggaatttgaagaagcctacattcctaaagagcagaagtactctttcctgcaaaacccacagacttctctctgcttcagcgaatctattccgacgccttccaatcgcgaggaaactcagcaaaagtccaatctggaactactccgcatttctctgcttctgattcagagctggctagaaccagtgcaatttctgcgttccgtcttcgccaatagcctagtttatggcgcatccgacagcaacgtatacgatctcctgaaagatctcgaggaaggcattcagaccctgatgggtcgtctcgaggatggctctccgcgtactggtcagatcttcaagcagacttactctaaatttgatactaacagccacaatgacgatgcgcttctaaaaaactatggtctgctgtattgttttcgtaaagatatggacaaagttgaaaccttcctgcgtattgttcagtgtcgttccgttgagggcagctgtggtttctaaggtggtacctctgaaagcgcaactcctgagtctggcccaggtagcgaacctgctacctccggctctgagactccaggtacctctgaaagcgcaaccccggaatctggtccaggtagcgaacctgcaacctctggctctgaaaccccaggtacctctgaaagcgctactcctgaatctggcccaggtacttctactgaaccgtccgagggcagcgcaccaggtagccctgctggctctccaacctccaccgaagaaggtacctctgaaagcgcaacccctgaatccggcccaggtagcgaaccggcaacctccggttctgaaaccccaggtacttctgaaagcgctactcctgagtccggcccaggtagcccggctggctctccgacttccaccgaggaaggtagcccggctggctctccaacttctactgaagaaggtacttctaccgaaccttccgagggcagcgcaccaggtacttctgaaagcgctacccctgagtccggcccaggtacttctgaaagcgctactcctgaatccggtccaggtacttctgaaagcgctaccccggaatctggcccaggtagcgaaccggctacttctggttctgaaaccccaggtagcgaaccggctacctccggttctgaaactccaggtagcccagcaggctctccgacttccactgaggaaggtacttctactgaaccttccgaaggcagcgcaccaggtacctctactgaaccttctgagggcagcgctccaggtagcgaacctgcaacctctggctctgaaaccccaggtacctctgaaagcgctactcctgaatctggcccaggtacttctactgaaccgtccgagggcagcgcacca

SEQ ID NO: 793 - protein, 1405 aa, Artificial Sequence
  Description of Artificial Sequence: Synthetic polypeptide
MAEPAGSPTSTEEGASPGTSSTGSPGSSTPSGATGSPGSSTPSGATGSPGTSTEPSEGSAPGSEPATSGSETPGSPAGSPTSTEEGSTSSTAESPGPGTSTPESGSASPGSTSESPSGTAPGSTSESPSGTAPGTSTPESGSASPGTSTPESGSASPGSEPATSGSETPGTSESATPESGPGSPAGSPTSTEEGTSTEPSEGSAPGTSESATPESGPGTSTEPSEGSAPGTSTEPSEGSAPGSPAGSPTSTEEGTSTEPSEGSAPGTSTEPSEGSAPGTSESATPESGPGTSESATPESGPGTSTEPSEGSAPGTSTEPSEGSAPGTSESATPESGPGTSTEPSEGSAPGSEPATSGSETPGSPAGSPTSTEEGSSTPSGATGSPGTPGSGTASSSPGSSTPSGATGSPGTSTEPSEGSAPGTSTEPSEGSAPGSEPATSGSETPGSPAGSPTSTEEGSPAGSPTSTEEGTSTEPSEGSAPGASASGAPSTGGTSESATPESGPGSPAGSPTSTEEGSPAGSPTSTEEGSTSSTAESPGPGSTSESPSGTAPGTSPSGESSTAPGTPGSGTASSSPGSSTPSGATGSPGSSPSASTGTGPGSEPATSGSETPGTSESATPESGPGSEPATSGSETPGSTSSTAESPGPGSTSSTAESPGPGTSPSGESSTAPGSEPATSGSETPGSEPATSGSETPGTSTEPSEGSAPGSTSSTAESPGPGTSTPESGSASPGSTSESPSGTAPGTSTEPSEGSAPGTSTEPSEGSAPGTSTEPSEGSAPGSSTPSGATGSPGSSPSASTGTGPGASPGTSSTGSPGSEPATSGSETPGTSESATPESGPGSPAGSPTSTEEGSSTPSGATGSPGSSPSASTGTGPGASPGTSSTGSPGTSESATPESGPGTSTEPSEGSAPGTSTEPSEGSAPGFPTIPLSRLFDNAMLRAHRLHQLAFDTYQEFEEAYIPKEQKYSFLQNPQTSLCFSESIPTPSNREETQQKSNLELLRISLLLIQSWLEPVQFLRSVFANSLVYGASDSNVYDLLKDLEEGIQTLMGRLEDGSPRTGQIFKQTYSKFDTNSHNDDALLKNYGLLYCFRKDMDKVETFLRIVQCRSVEGSCGFGGTSESATPESGPGSEPATSGSETPGTSESATPESGPGSEPATSGSETPGTSESATPESGPGTSTEPSEGSAPGSPAGSPTSTEEGTSESATPESGPGSEPATSGSETPGTSESATPESGPGSPAGSPTSTEEGSPAGSPTSTEEGTSTEPSEGSAPGTSESATPESGPGTSESATPESGPGTSESATPESGPGSEPATSGSETPGSEPATSGSETPGSPAGSPTSTEEGTSTEPSEGSAPGTSTEPSEGSAPGSEPATSGSETPGTSESATPESGPGTSTEPSEGSAP

SEQ ID NO: 794 - DNA, 4218 bp, Artificial Sequence
  Description of Artificial Sequence: Synthetic polynucleotide
atggctgaacctgctggctctccaacctccactgaggaaggtgcatccccgggcaccagctctaccggttctccaggtagctctaccccgtctggtgctaccggctctccaggtagctctaccccgtctggtgctactggctctccaggtacttctactgaaccgtctgaaggcagcgcaccaggtagcgaaccggctacttccggttctgaaaccccaggtagcccagcaggttctccaacttctactgaagaaggttctaccagctctaccgcagaatctcctggtccaggtacctctactccggaaagcggctctgcatctccaggttctactagcgaatctccttctggcactgcaccaggttctactagcgaatccccgtctggtactgctccaggtacttctactcctgaaagcggttccgcttctccaggtacctctactccggaaagcggttctgcatctccaggtagcgaaccggcaacctccggctctgaaaccccaggtacctctgaaagcgctactcctgaatccggcccaggtagcccggcaggttctccgacttccactgaggaaggtacctctactgaaccttctgagggcagcgctccaggtacttctgaaagcgctaccccggagtccggtccaggtacttctactgaaccgtccgaaggtagcgcaccaggtacttctaccgaaccgtccgagggtagcgcaccaggtagcccagcaggttctcctacctccaccgaggaaggtacttctaccgaaccgtccgagggtagcgcaccaggtacttctaccgaaccttccgagggcagcgcaccaggtacttctgaaagcgctacccctgagtccggcccaggtacttctgaaagcgctactcctgaatccggtccaggtacctctactgaaccttccgaaggcagcgctccaggtacctctaccgaaccgtccgagggcagcgcaccaggtacttctgaaagcgcaacccctgaatccggtccaggtacttctactgaaccttccgaaggtagcgctccaggtagcgaacctgctacttctggttctgaaaccccaggtagcccggctggctctccgacctccaccgaggaaggtagctctaccccgtctggtgctactggttctccaggtactccgggcagcggtactgcttcttcctctccaggtagctctaccccttctggtgctactggctctccaggtacctctaccgaaccgtccgagggtagcgcaccaggtacctctactgaaccgtctgagggtagcgctccaggtagcgaaccggcaacctccggttctgaaactccaggtagccctgctggctctccgacttctactgaggaaggtagcccggctggttctccgacttctactgaggaaggtacttctaccgaaccttccgaaggtagcgctccaggtgcaagcgcaagcggcgcgccaagcacgggaggtacttctgaaagcgctactcctgagtccggcccaggtagcccggctggctctccgacttccaccgaggaaggtagcccggctggctctccaacttctactgaagaaggttctaccagctctaccgctgaatctcctggcccaggttctactagcgaatctccgtctggcaccgcaccaggtacttcccctagcggtgaatcttctactgcaccaggtacccctggcagcggtaccgcttcttcctctccaggtagctctaccccgtctggtgctactggctctccaggttctagcccgtctgcatctaccggtaccggcccaggtagcgaaccggcaacctccggctctgaaactccaggtacttctgaaagcgctactccggaatccggcccaggtagcgaaccggctacttccggctctgaaaccccaggttccaccagctctactgcagaatctccgggcccaggttctactagctctactgcagaatctccgggtccaggtacttctcctagcggcgaatcttctaccgctccaggtagcgaaccggcaacctctggctctgaaactccaggtagcgaacctgcaacctccggctctgaaaccccaggtacttctactgaaccttctgagggcagcgcaccaggttctaccagctctaccgcagaatctcctggtccaggtacctctactccggaaagcggctctgcatctccaggttctactagcgaatctccttctggcactgcaccaggtacttctaccgaaccgtccgaaggcagcgctccaggtacctctactgaaccttccgagggcagcgctccaggtacctctaccgaaccttctgaaggtagcgcaccaggtagctctactccgtctggtgcaaccggctccccaggttctagcccgtctgcttccactggtactggcccaggtgcttccccgggcaccagctctactggttctccaggtagcgaacctgctacctccggttctgaaaccccaggtacctctgaaagcgcaactccggagtctggtccaggtagccctgcaggttctcctacctccactgaggaaggtagctctactccgtctggtgcaaccggctccccaggttctagcccgtctgcttccactggtactggcccaggtgcttccccgggcaccagctctactggttctccaggtacctctgaaagcgctactccggagtctggcccaggtacctctactgaaccgtctgagggtagcgctccaggtacttctactgaaccgtccgaaggtagcgcaccaggttttccgactattccgctgtctcgtctgtttgataatgctatgctgcgtgcgcaccgtctgcaccagctggcctttgatacttaccaggaatttgaagaagcctacattcctaaagagcagaagtactctttcctgcaaaacccacagacttctctctgcttcagcgaatctattccgacgccttccaatcgcgaggaaactcagcaaaagtccaatctggaactactccgcatttctctgcttctgattcagagctggctagaaccagtgcaatttctgcgttccgtcttcgccaatagcctagtttatggcgcatccgacagcaacgtatacgatctcctgaaagatctcgaggaaggcattcagaccctgatgggtcgtctcgaggatggctctccgcgtactggtcagatcttcaagcagacttactctaaatttgatactaacagccacaatgacgatgcgcttctaaaaaactatggtctgctgtattgttttcgtaaagatatggacaaagttgaaaccttcctgcgtattgttcagtgtcgttccgttgagggcagctgtggtttctaaggtggtacctctgaaagcgcaactcctgagtctggcccaggtagcgaacctgctacctccggctctgagactccaggtacctctgaaagcgcaaccccggaatctggtccaggtagcgaacctgcaacctctggctctgaaaccccaggtacctctgaaagcgctactcctgaatctggcccaggtacttctactgaaccgtccgagggcagcgcaccaggtagccctgctggctctccaacctccaccgaagaaggtacctctgaaagcgcaacccctgaatccggcccaggtagcgaaccggcaacctccggttctgaaaccccaggtacttctgaaagcgctactcctgagtccggcccaggtagcccggctggctctccgacttccaccgaggaaggtagcccggctggctctccaacttctactgaagaaggtacttctaccgaaccttccgagggcagcgcaccaggtacttctgaaagcgctacccctgagtccggcccaggtacttctgaaagcgctactcctgaatccggtccaggtacttctgaaagcgctaccccggaatctggcccaggtagcgaaccggctacttctggttctgaaaccccaggtagcgaaccggctacctccggttctgaaactccaggtagcccagcaggctctccgacttccactgaggaaggtacttctactgaaccttccgaaggcagcgcaccaggtacctctactgaaccttctgagggcagcgctccaggtagcgaacctgcaacctctggctctgaaaccccaggtacctctgaaagcgctactcctgaatctggcccaggtacttctactgaaccgtccgagggcagcgcacca

SEQ ID NO: 795 - protein, 1799 aa, Artificial Sequence
  Description of Artificial Sequence: Synthetic polypeptide
GTSTEPSEGSAPGSEPATSGSETPGSPAGSPTSTEEGSTSSTAESPGPGTSTPESGSASPGSTSESPSGTAPGSTSESPSGTAPGTSTPESGSASPGTSTPESGSASPGSEPATSGSETPGTSESATPESGPGSPAGSPTSTEEGTSTEPSEGSAPGTSESATPESGPGTSTEPSEGSAPGTSTEPSEGSAPGSPAGSPTSTEEGTSTEPSEGSAPGTSTEPSEGSAPGTSESATPESGPGTSESATPESGPGTSTEPSEGSAPGTSTEPSEGSAPGTSESATPESGPGTSTEPSEGSAPGSEPATSGSETPGSPAGSPTSTEEGSSTPSGATGSPGTPGSGTASSSPGSSTPSGATGSPGTSTEPSEGSAPGTSTEPSEGSAPGSEPATSGSETPGSPAGSPTSTEEGSPAGSPTSTEEGTSTEPSEGSAPGPEPTGPAPSGGSEPATSGSETPGTSESATPESGPGSPAGSPTSTEEGTSESATPESGPGSPAGSPTSTEEGSPAGSPTSTEEGTSESATPESGPGSPAGSPTSTEEGSPAGSPTSTEEGSTSSTAESPGPGSTSESPSGTAPGTSPSGESSTAPGSTSESPSGTAPGSTSESPSGTAPGTSPSGESSTAPGTSTEPSEGSAPGTSESATPESGPGTSESATPESGPGSEPATSGSETPGTSESATPESGPGTSESATPESGPGTSTEPSEGSAPGTSESATPESGPGTSTEPSEGSAPGTSPSGESSTAPGTSPSGESSTAPGTSPSGESSTAPGTSTEPSEGSAPGSPAGSPTSTEEGTSTEPSEGSAPGSSPSASTGTGPGSSTPSGATGSPGSSTPSGATGSPGSSTPSGATGSPGSSTPSGATGSPGASPGTSSTGSPGASASGAPSTGGTSPSGESSTAPGSTSSTAESPGPGTSPSGESSTAPGTSESATPESGPGTSTEPSEGSAPGTSTEPSEGSAPGSSPSASTGTGPGSSTPSGATGSPGASPGTSSTGSPGTSTPESGSASPGTSPSGESSTAPGTSPSGESSTAPGTSESATPESGPGSEPATSGSETPGTSTEPSEGSAPGSTSESPSGTAPGSTSESPSGTAPGTSTPESGSASPGSPAGSPTSTEEGTSESATPESGPGTSTEPSEGSAPGSPAGSPTSTEEGTSESATPESGPGSEPATSGSETPGSSTPSGATGSPGASPGTSSTGSPGSSTPSGATGSPGSTSESPSGTAPGTSPSGESSTAPGSTSSTAESPGPGSSTPSGATGSPGASPGTSSTGSPGTPGSGTASSSPGSPAGSPTSTEEGSPAGSPTSTEEGTSTEPSEGSAPGFPTIPLSRLFDNAMLRAHRLHQLAFDTYQEFEEAYIPKEQKYSFLQNPQTSLCFSESIPTPSNREETQQKSNLELLRISLLLIQSWLEPVQFLRSVFANSLVYGASDSNVYDLLKDLEEGIQTLMGRLEDGSPRTGQIFKQTYSKFDTNSHNDDALLKNYGLLYCFRKDMDKVETFLRIVQCRSVEGSCGFGGTSESATPESGPGSEPATSGSETPGTSESATPESGPGSEPATSGSETPGTSESATPESGPGTSTEPSEGSAPGSPAGSPTSTEEGTSESATPESGPGSEPATSGSETPGTSESATPESGPGSPAGSPTSTEEGSPAGSPTSTEEGTSTEPSEGSAPGTSESATPESGPGTSESATPESGPGTSESATPESGPGSEPATSGSETPGSEPATSGSETPGSPAGSPTSTEEGTSTEPSEGSAPGTSTEPSEGSAPGSEPATSGSETPGTSESATPESGPGTSTEPSEGSAP

SEQ ID NO: 796 - DNA, 5400 bp, Artificial Sequence
  Description of Artificial Sequence: Synthetic polynucleotide
ggtacttctactgaaccgtctgaaggcagcgcaccaggtagcgaaccggctacttccggttctgaaaccccaggtagcccagcaggttctccaacttctactgaagaaggttctaccagctctaccgcagaatctcctggtccaggtacctctactccggaaagcggctctgcatctccaggttctactagcgaatctccttctggcactgcaccaggttctactagcgaatccccgtctggtactgctccaggtacttctactcctgaaagcggttccgcttctccaggtacctctactccggaaagcggttctgcatctccaggtagcgaaccggcaacctccggctctgaaaccccaggtacctctgaaagcgctactcctgaatccggcccaggtagcccggcaggttctccgacttccactgaggaaggtacctctactgaaccttctgagggcagcgctccaggtacttctgaaagcgctaccccggagtccggtccaggtacttctactgaaccgtccgaaggtagcgcaccaggtacttctaccgaaccgtccgagggtagcgcaccaggtagcccagcaggttctcctacctccaccgaggaaggtacttctaccgaaccgtccgagggtagcgcaccaggtacttctaccgaaccttccgagggcagcgcaccaggtacttctgaaagcgctacccctgagtccggcccaggtacttctgaaagcgctactcctgaatccggtccaggtacctctactgaaccttccgaaggcagcgctccaggtacctctaccgaaccgtccgagggcagcgcaccaggtacttctgaaagcgcaacccctgaatccggtccaggtacttctactgaaccttccgaaggtagcgctccaggtagcgaacctgctacttctggttctgaaaccccaggtagcccggctggctctccgacctccaccgaggaaggtagctctaccccgtctggtgctactggttctccaggtactccgggcagcggtactgcttcttcctctccaggtagctctaccccttctggtgctactggctctccaggtacctctaccgaaccgtccgagggtagcgcaccaggtacctctactgaaccgtctgagggtagcgctccaggtagcgaaccggcaacctccggttctgaaactccaggtagccctgctggctctccgacttctactgaggaaggtagcccggctggttctccgacttctactgaggaaggtacttctaccgaaccttccgaaggtagcgctccaggtccagaaccaacggggccggccccaagcggaggtagcgaaccggcaacctccggctctgaaaccccaggtacctctgaaagcgctactcctgaatccggcccaggtagcccggcaggttctccgacttccactgaggaaggtacttctgaaagcgctactcctgagtccggcccaggtagcccggctggctctccgacttccaccgaggaaggtagcccggctggctctccaacttctactgaagaaggtacttctgaaagcgctactcctgagtccggcccaggtagcccggctggctctccgacttccaccgaggaaggtagcccggctggctctccaacttctactgaagaaggttctaccagctctaccgctgaatctcctggcccaggttctactagcgaatctccgtctggcaccgcaccaggtacttcccctagcggtgaatcttctactgcaccaggttctaccagcgaatctccttctggcaccgctccaggttctactagcgaatccccgtctggtaccgcaccaggtacttctcctagcggcgaatcttctaccgcaccaggtacttctaccgaaccttccgagggcagcgcaccaggtacttctgaaagcgctacccctgagtccggcccaggtacttctgaaagcgctactcctgaatccggtccaggtagcgaaccggcaacctctggctctgaaaccccaggtacctctgaaagcgctactccggaatctggtccaggtacttctgaaagcgctactccggaatccggtccaggtacctctactgaaccttctgagggcagcgctccaggtacttctgaaagcgctaccccggagtccggtccaggtacttctactgaaccgtccgaaggtagcgcaccaggtacctcccctagcggcgaatcttctactgctccaggtacctctcctagcggcgaatcttctaccgctccaggtacctcccctagcggtgaatcttctaccgcaccaggtacttctaccgaaccgtccgagggtagcgcaccaggtagcccagcaggttctcctacctccaccgaggaaggtacttctaccgaaccgtccgagggtagcgcaccaggttctagcccttctgcttccaccggtaccggcccaggtagctctactccgtctggtgcaactggctctccaggtagctctactccgtctggtgcaaccggctccccaggtagctctaccccgtctggtgctaccggctctccaggtagctctaccccgtctggtgcaaccggctccccaggtgcatccccgggtactagctctaccggttctccaggtgcaagcgcaagcggcgcgccaagcacgggaggtacttctccgagcggtgaatcttctaccgcaccaggttctactagctctaccgctgaatctccgggcccaggtacttctccgagcggtgaatcttctactgctccaggtacctctgaaagcgctactccggagtctggcccaggtacctctactgaaccgtctgagggtagcgctccaggtacttctactgaaccgtccgaaggtagcgcaccaggttctagcccttctgcatctactggtactggcccaggtagctctactccttctggtgctaccggctctccaggtgcttctccgggtactagctctaccggttctccaggtacttctactccggaaagcggttccgcatctccaggtacttctcctagcggtgaatcttctactgctccaggtacctctcctagcggcgaatcttctactgctccaggtacttctgaaagcgcaacccctgaatccggtccaggtagcgaaccggctacttctggctctgagactccaggtacttctaccgaaccgtccgaaggtagcgcaccaggttctaccagcgaatccccttctggtactgctccaggttctaccagcgaatccccttctggcaccgcaccaggtacttctacccctgaaagcggctccgcttctccaggtagcccggcaggctctccgacctctactgaggaaggtacttctgaaagcgcaaccccggagtccggcccaggtacctctaccgaaccgtctgagggcagcgcaccaggtagccctgctggctctccaacctccaccgaagaaggtacctctgaaagcgcaacccctgaatccggcccaggtagcgaaccggcaacctccggttctgaaaccccaggtagctctaccccgtctggtgctaccggttccccaggtgcttctcctggtactagctctaccggttctccaggtagctctaccccgtctggtgctactggctctccaggttctactagcgaatccccgtctggtactgctccaggtacttcccctagcggtgaatcttctactgctccaggttctaccagctctaccgcagaatctccgggtccaggtagctctaccccttctggtgcaaccggctctccaggtgcatccccgggtaccagctctaccggttctccaggtactccgggtagcggtaccgcttcttcctctccaggtagccctgctggctctccgacttctactgaggaaggtagcccggctggttctccgacttctactgaggaaggtacttctaccgaaccttccgaaggtagcgctccaggttttccgactattccgctgtctcgtctgtttgataatgctatgctgcgtgcgcaccgtctgcaccagctggcctttgatacttaccaggaatttgaagaagcctacattcctaaagagcagaagtactctttcctgcaaaacccacagacttctctctgcttcagcgaatctattccgacgccttccaatcgcgaggaaactcagcaaaagtccaatctggaactactccgcatttctctgcttctgattcagagctggctagaaccagtgcaatttctgcgttccgtcttcgccaatagcctagtttatggcgcatccgacagcaacgtatacgatctcctgaaagatctcgaggaaggcattcagaccctgatgggtcgtctcgaggatggctctccgcgtactggtcagatcttcaagcagacttactctaaatttgatactaacagccacaatgacgatgcgcttctaaaaaactatggtctgctgtattgttttcgtaaagatatggacaaagttgaaaccttcctgcgtattgttcagtgtcgttccgttgagggcagctgtggtttctaaggtggtacctctgaaagcgcaactcctgagtctggcccaggtagcgaacctgctacctccggctctgagactccaggtacctctgaaagcgcaaccccggaatctggtccaggtagcgaacctgcaacctctggctctgaaaccccaggtacctctgaaagcgctactcctgaatctggcccaggtacttctactgaaccgtccgagggcagcgcaccaggtagccctgctggctctccaacctccaccgaagaaggtacctctgaaagcgcaacccctgaatccggcccaggtagcgaaccggcaacctccggttctgaaaccccaggtacttctgaaagcgctactcctgagtccggcccaggtagcccggctggctctccgacttccaccgaggaaggtagcccggctggctctccaacttctactgaagaaggtacttctaccgaaccttccgagggcagcgcaccaggtacttctgaaagcgctacccctgagtccggcccaggtacttctgaaagcgctactcctgaatccggtccaggtacttctgaaagcgctaccccggaatctggcccaggtagcgaaccggctacttctggttctgaaaccccaggtagcgaaccggctacctccggttctgaaactccaggtagcccagcaggctctccgacttccactgaggaaggtacttctactgaaccttccgaaggcagcgcaccaggtacctctactgaaccttctgagggcagcgctccaggtagcgaacctgcaacctctggctctgaaaccccaggtacctctgaaagcgctactcctgaatctggcccaggtacttctactgaaccgtccgagggcagcgcacca

SEQ ID NO: 797 - protein, 1261 aa, Artificial Sequence
  Description of Artificial Sequence: Synthetic polypeptide
MAEPAGSPTSTEEGTPGSGTASSSPGSSTPSGATGSPGASPGTSSTGSPGSPAGSPTSTEEGTSESATPESGPGTSTEPSEGSAPGSPAGSPTSTEEGTSTEPSEGSAPGTSTEPSEGSAPGTSESATPESGPGSEPATSGSETPGSEPATSGSETPGSPAGSPTSTEEGTSESATPESGPGTSTEPSEGSAPGTSTEPSEGSAPGSPAGSPTSTEEGTSTEPSEGSAPGTSTEPSEGSAPGTSESATPESGPGTSTEPSEGSAPGTSESATPESGPGSEPATSGSETPGTSTEPSEGSAPGTSTEPSEGSAPGTSESATPESGPGTSESATPESGPGSPAGSPTSTEEGTSESATPESGPGSEPATSGSETPGTSESATPESGPGTSTEPSEGSAPGTSTEPSEGSAPGTSTEPSEGSAPGTSTEPSEGSAPGTSTEPSEGSAPGTSTEPSEGSAPGSPAGSPTSTEEGTSTEPSEGSAPGTSESATPESGPGSEPATSGSETPGTSESATPESGPGSEPATSGSETPGTSESATPESGPGTSTEPSEGSAPGTSESATPESGPGSPAGSPTSTEEGSPAGSPTSTEEGSPAGSPTSTEEGTSESATPESGPGTSTEPSEGSAPGTSESATPESGPGSEPATSGSETPGTSESATPESGPGSEPATSGSETPGTSESATPESGPGTSTEPSEGSAPGSPAGSPTSTEEGTSESATPESGPGSEPATSGSETPGTSESATPESGPGSPAGSPTSTEEGSPAGSPTSTEEGTSTEPSEGSAPGTSESATPESGPGTSESATPESGPGTSESATPESGPGSEPATSGSETPGSEPATSGSETPGSPAGSPTSTEEGTSTEPSEGSAPGTSTEPSEGSAPGSEPATSGSETPGTSESATPESGPGTSTEPSEGSAPGFPTIPLSRLFDNAMLRAHRLHQLAFDTYQEFEEAYIPKEQKYSFLQNPQTSLCFSESIPTPSNREETQQKSNLELLRISLLLIQSWLEPVQFLRSVFANSLVYGASDSNVYDLLKDLEEGIQTLMGRLEDGSPRTGQIFKQTYSKFDTNSHNDDALLKNYGLLYCFRKDMDKVETFLRIVQCRSVEGSCGFGLTPRSLLVGGGGSEPATSGSETPGTSESATPESGPGSEPATSGSETPGSPAGSPTSTEEGTSTEPSEGSAPGSEPATSGSETPGSEPATSGSETPGSEPATSGSETPGTSTEPSEGSAPGTSESATPESGPGSEPATSGSETPGTSTEPSEGSAP

SEQ ID NO: 798 - DNA, 3786 bp, Artificial Sequence
  Description of Artificial Sequence: Synthetic polynucleotide
atggctgaacctgctggctctccaacctccactgaggaaggtaccccgggtagcggtactgcttcttcctctccaggtagctctaccccttctggtgcaaccggctctccaggtgcttctccgggcaccagctctaccggttctccaggtagcccggctggctctcctacctctactgaggaaggtacttctgaaagcgctactcctgagtctggtccaggtacctctactgaaccgtccgaaggtagcgctccaggtagcccagcaggctctccgacttccactgaggaaggtacttctactgaaccttccgaaggcagcgcaccaggtacctctactgaaccttctgagggcagcgctccaggtacttctgaaagcgctaccccggaatctggcccaggtagcgaaccggctacttctggttctgaaaccccaggtagcgaaccggctacctccggttctgaaactccaggtagcccggcaggctctccgacctctactgaggaaggtacttctgaaagcgcaaccccggagtccggcccaggtacctctaccgaaccgtctgagggcagcgcaccaggtacttctaccgaaccgtccgagggtagcgcaccaggtagcccagcaggttctcctacctccaccgaggaaggtacttctaccgaaccgtccgagggtagcgcaccaggtacctctactgaaccttctgagggcagcgctccaggtacttctgaaagcgctaccccggagtccggtccaggtacttctactgaaccgtccgaaggtagcgcaccaggtacttctgaaagcgcaacccctgaatccggtccaggtagcgaaccggctacttctggctctgagactccaggtacttctaccgaaccgtccgaaggtagcgcaccaggtacttctactgaaccgtctgaaggtagcgcaccaggtacttctgaaagcgcaaccccggaatccggcccaggtacctctgaaagcgcaaccccggagtccggcccaggtagccctgctggctctccaacctccaccgaagaaggtacctctgaaagcgcaacccctgaatccggcccaggtagcgaaccggcaacctccggttctgaaaccccaggtacctctgaaagcgctactccggagtctggcccaggtacctctactgaaccgtctgagggtagcgctccaggtacttctactgaaccgtccgaaggtagcgcaccaggtacttctaccgaaccgtccgaaggcagcgctccaggtacctctactgaaccttccgagggcagcgctccaggtacctctaccgaaccttctgaaggtagcgcaccaggtacttctaccgaaccgtccgagggtagcgcaccaggtagcccagcaggttctcctacctccaccgaggaaggtacttctaccgaaccgtccgagggtagcgcaccaggtacctctgaaagcgcaactcctgagtctggcccaggtagcgaacctgctacctccggctctgagactccaggtacctctgaaagcgcaaccccggaatctggtccaggtagcgaacctgcaacctctggctctgaaaccccaggtacctctgaaagcgctactcctgaatctggcccaggtacttctactgaaccgtccgagggcagcgcaccaggtacttctgaaagcgctactcctgagtccggcccaggtagcccggctggctctccgacttccaccgaggaaggtagcccggctggctctccaacttctactgaagaaggtagcccggcaggctctccgacctctactgaggaaggtacttctgaaagcgcaaccccggagtccggcccaggtacctctaccgaaccgtctgagggcagcgcaccaggtacctctgaaagcgcaactcctgagtctggcccaggtagcgaacctgctacctccggctctgagactccaggtacctctgaaagcgcaaccccggaatctggtccaggtagcgaacctgcaacctctggctctgaaaccccaggtacctctgaaagcgctactcctgaatctggcccaggtacttctactgaaccgtccgagggcagcgcaccaggtagccctgctggctctccaacctccaccgaagaaggtacctctgaaagcgcaacccctgaatccggcccaggtagcgaaccggcaacctccggttctgaaaccccaggtacttctgaaagcgctactcctgagtccggcccaggtagcccggctggctctccgacttccaccgaggaaggtagcccggctggctctccaacttctactgaagaaggtacttctaccgaaccttccgagggcagcgcaccaggtacttctgaaagcgctacccctgagtccggcccaggtacttctgaaagcgctactcctgaatccggtccaggtacttctgaaagcgctaccccggaatctggcccaggtagcgaaccggctacttctggttctgaaaccccaggtagcgaaccggctacctccggttctgaaactccaggtagcccagcaggctctccgacttccactgaggaaggtacttctactgaaccttccgaaggcagcgcaccaggtacctctactgaaccttctgagggcagcgctccaggtagcgaacctgcaacctctggctctgaaaccccaggtacctctgaaagcgctactcctgaatctggcccaggtacttctactgaaccgtccgagggcagcgcaccaggttttccgactattccgctgtctcgtctgtttgataatgctatgctgcgtgcgcaccgtctgcaccagctggcctttgatacttaccaggaatttgaagaagcctacattcctaaagagcagaagtactctttcctgcaaaacccacagacttctctctgcttcagcgaatctattccgacgccttccaatcgcgaggaaactcagcaaaagtccaatctggaactactccgcatttctctgcttctgattcagagctggctagaaccagtgcaatttctgcgttccgtcttcgccaatagcctagtttatggcgcatccgacagcaacgtatacgatctcctgaaagatctcgaggaaggcattcagaccctgatgggtcgtctcgaggatggctctccgcgtactggtcagatcttcaagcagacttactctaaatttgatactaacagccacaatgacgatgcgcttctaaaaaactatggtctgctgtattgttttcgtaaagatatggacaaagttgaaaccttcctgcgtattgttcagtgtcgttccgttgagggcagctgtggtttctaaggtctgaccccgcgcagcctgctggtgggcggcggtggtagcgaaccggcaacttccggctctgaaaccccaggtacttctgaaagcgctactcctgagtctggcccaggtagcgaacctgctacctctggctctgaaaccccaggtagcccggcaggctctccgacttccaccgaggaaggtacctctactgaaccttctgagggtagcgctccaggtagcgaaccggcaacctctggctctgaaaccccaggtagcgaacctgctacctccggctctgaaactccaggtagcgaaccggctacttccggttctgaaactccaggtacctctaccgaaccttccgaaggcagcgcaccaggtacttctgaaagcgcaacccctgaatccggtccaggtagcgaaccggctacttctggctctgagactccaggtacttctaccgaaccgtccgaaggtagcgcacca

SEQ ID NO: 799 - protein, 1261 aa, Artificial Sequence
  Description of Artificial Sequence: Synthetic polypeptide
MAEPAGSPTSTEEGTPGSGTASSSPGSSTPSGATGSPGASPGTSSTGSPGSPAGSPTSTEEGTSESATPESGPGTSTEPSEGSAPGSPAGSPTSTEEGTSTEPSEGSAPGTSTEPSEGSAPGTSESATPESGPGSEPATSGSETPGSEPATSGSETPGSPAGSPTSTEEGTSESATPESGPGTSTEPSEGSAPGTSTEPSEGSAPGSPAGSPTSTEEGTSTEPSEGSAPGTSTEPSEGSAPGTSESATPESGPGTSTEPSEGSAPGTSESATPESGPGSEPATSGSETPGTSTEPSEGSAPGTSTEPSEGSAPGTSESATPESGPGTSESATPESGPGSPAGSPTSTEEGTSESATPESGPGSEPATSGSETPGTSESATPESGPGTSTEPSEGSAPGTSTEPSEGSAPGTSTEPSEGSAPGTSTEPSEGSAPGTSTEPSEGSAPGTSTEPSEGSAPGSPAGSPTSTEEGTSTEPSEGSAPGTSESATPESGPGSEPATSGSETPGTSESATPESGPGSEPATSGSETPGTSESATPESGPGTSTEPSEGSAPGTSESATPESGPGSPAGSPTSTEEGSPAGSPTSTEEGSPAGSPTSTEEGTSESATPESGPGTSTEPSEGSAPGTSESATPESGPGSEPATSGSETPGTSESATPESGPGSEPATSGSETPGTSESATPESGPGTSTEPSEGSAPGSPAGSPTSTEEGTSESATPESGPGSEPATSGSETPGTSESATPESGPGSPAGSPTSTEEGSPAGSPTSTEEGTSTEPSEGSAPGTSESATPESGPGTSESATPESGPGTSESATPESGPGSEPATSGSETPGSEPATSGSETPGSPAGSPTSTEEGTSTEPSEGSAPGTSTEPSEGSAPGSEPATSGSETPGTSESATPESGPGTSTEPSEGSAPGFPTIPLSRLFDNAMLRAHRLHQLAFDTYQEFEEAYIPKEQKYSFLQNPQTSLCFSESIPTPSNREETQQKSNLELLRISLLLIQSWLEPVQFLRSVFANSLVYGASDSNVYDLLKDLEEGIQTLMGRLEDGSPRTGQIFKQTYSKFDTNSHNDDALLKNYGLLYCFRKDMDKVETFLRIVQCRSVEGSCGFGGGKLTRVVGGGGSEPATSGSETPGTSESATPESGPGSEPATSGSETPGSPAGSPTSTEEGTSTEPSEGSAPGSEPATSGSETPGSEPATSGSETPGSEPATSGSETPGTSTEPSEGSAPGTSESATPESGPGSEPATSGSETPGTSTEPSEGSAP

SEQ ID NO: 800 - DNA, 3786 bp, Artificial Sequence
  Description of Artificial Sequence: Synthetic polynucleotide
atggctgaacctgctggctctccaacctccactgaggaaggtaccccgggtagcggtactgcttcttcctctccaggtagctctaccccttctggtgcaaccggctctccaggtgcttctccgggcaccagctctaccggttctccaggtagcccggctggctctcctacctctactgaggaaggtacttctgaaagcgctactcctgagtctggtccaggtacctctactgaaccgtccgaaggtagcgctccaggtagcccagcaggctctccgacttccactgaggaaggtacttctactgaaccttccgaaggcagcgcaccaggtacctctactgaaccttctgagggcagcgctccaggtacttctgaaagcgctaccccggaatctggcccaggtagcgaaccggctacttctggttctgaaaccccaggtagcgaaccggctacctccggttctgaaactccaggtagcccggcaggctctccgacctctactgaggaaggtacttctgaaagcgcaaccccggagtccggcccaggtacctctaccgaaccgtctgagggcagcgcaccaggtacttctaccgaaccgtccgagggtagcgcaccaggtagcccagcaggttctcctacctccaccgaggaaggtacttctaccgaaccgtccgagggtagcgcaccaggtacctctactgaaccttctgagggcagcgctccaggtacttctgaaagcgctaccccggagtccggtccaggtacttctactgaaccgtccgaaggtagcgcaccaggtacttctgaaagcgcaacccctgaatccggtccaggtagcgaaccggctacttctggctctgagactccaggtacttctaccgaaccgtccgaaggtagcgcaccaggtacttctactgaaccgtctgaaggtagcgcaccaggtacttctgaaagcgcaaccccggaatccggcccaggtacctctgaaagcgcaaccccggagtccggcccaggtagccctgctggctctccaacctccaccgaagaaggtacctctgaaagcgcaacccctgaatccggcccaggtagcgaaccggcaacctccggttctgaaaccccaggtacctctgaaagcgctactccggagtctggcccaggtacctctactgaaccgtctgagggtagcgctccaggtacttctactgaaccgtccgaaggtagcgcaccaggtacttctaccgaaccgtccgaaggcagcgctccaggtacctctactgaaccttccgagggcagcgctccaggtacctctaccgaaccttctgaaggtagcgcaccaggtacttctaccgaaccgtccgagggtagcgcaccaggtagcccagcaggttctcctacctccaccgaggaaggtacttctaccgaaccgtccgagggtagcgcaccaggtacctctgaaagcgcaactcctgagtctggcccaggtagcgaacctgctacctccggctctgagactccaggtacctctgaaagcgcaaccccggaatctggtccaggtagcgaacctgcaacctctggctctgaaaccccaggtacctctgaaagcgctactcctgaatctggcccaggtacttctactgaaccgtccgagggcagcgcaccaggtacttctgaaagcgctactcctgagtccggcccaggtagcccggctggctctccgacttccaccgaggaaggtagcccggctggctctccaacttctactgaagaaggtagcccggcaggctctccgacctctactgaggaaggtacttctgaaagcgcaaccccggagtccggcccaggtacctctaccgaaccgtctgagggcagcgcaccaggtacctctgaaagcgcaactcctgagtctggcccaggtagcgaacctgctacctccggctctgagactccaggtacctctgaaagcgcaaccccggaatctggtccaggtagcgaacctgcaacctctggctctgaaaccccaggtacctctgaaagcgctactcctgaatctggcccaggtacttctactgaaccgtccgagggcagcgcaccaggtagccctgctggctctccaacctccaccgaagaaggtacctctgaaagcgcaacccctgaatccggcccaggtagcgaaccggcaacctccggttctgaaaccccaggtacttctgaaagcgctactcctgagtccggcccaggtagcccggctggctctccgacttccaccgaggaaggtagcccggctggctctccaacttctactgaagaaggtacttctaccgaaccttccgagggcagcgcaccaggtacttctgaaagcgctacccctgagtccggcccaggtacttctgaaagcgctactcctgaatccggtccaggtacttctgaaagcgctaccccggaatctggcccaggtagcgaaccggctacttctggttctgaaaccccaggtagcgaaccggctacctccggttctgaaactccaggtagcccagcaggctctccgacttccactgaggaaggtacttctactgaaccttccgaaggcagcgcaccaggtacctctactgaaccttctgagggcagcgctccaggtagcgaacctgcaacctctggctctgaaaccccaggtacctctgaaagcgctactcctgaatctggcccaggtacttctactgaaccgtccgagggcagcgcaccaggttttccgactattccgctgtctcgtctgtttgataatgctatgctgcgtgcgcaccgtctgcaccagctggcctttgatacttaccaggaatttgaagaagcctacattcctaaagagcagaagtactctttcctgcaaaacccacagacttctctctgcttcagcgaatctattccgacgccttccaatcgcgaggaaactcagcaaaagtccaatctggaactactccgcatttctctgcttctgattcagagctggctagaaccagtgcaatttctgcgttccgtcttcgccaatagcctagtttatggcgcatccgacagcaacgtatacgatctcctgaaagatctcgaggaaggcattcagaccctgatgggtcgtctcgaggatggctctccgcgtactggtcagatcttcaagcagacttactctaaatttgatactaacagccacaatgacgatgcgcttctaaaaaactatggtctgctgtattgttttcgtaaagatatggacaaagttgaaaccttcctgcgtattgttcagtgtcgttccgttgagggcagctgtggtttctaaggtggcggcaaactgacccgcgtggtgggcggcggtggtagcgaaccggcaacttccggctctgaaaccccaggtacttctgaaagcgctactcctgagtctggcccaggtagcgaacctgctacctctggctctgaaaccccaggtagcccggcaggctctccgacttccaccgaggaaggtacctctactgaaccttctgagggtagcgctccaggtagcgaaccggcaacctctggctctgaaaccccaggtagcgaacctgctacctccggctctgaaactccaggtagcgaaccggctacttccggttctgaaactccaggtacctctaccgaaccttccgaaggcagcgcaccaggtacttctgaaagcgcaacccctgaatccggtccaggtagcgaaccggctacttctggctctgagactccaggtacttctaccgaaccgtccgaaggtagcgcacca

SEQ ID NO: 801 - protein, 1261 aa, Artificial Sequence
  Description of Artificial Sequence: Synthetic polypeptide
MAEPAGSPTSTEEGTPGSGTASSSPGSSTPSGATGSPGASPGTSSTGSPGSPAGSPTSTEEGTSESATPESGPGTSTEPSEGSAPGSPAGSPTSTEEGTSTEPSEGSAPGTSTEPSEGSAPGTSESATPESGPGSEPATSGSETPGSEPATSGSETPGSPAGSPTSTEEGTSESATPESGPGTSTEPSEGSAPGTSTEPSEGSAPGSPAGSPTSTEEGTSTEPSEGSAPGTSTEPSEGSAPGTSESATPESGPGTSTEPSEGSAPGTSESATPESGPGSEPATSGSETPGTSTEPSEGSAPGTSTEPSEGSAPGTSESATPESGPGTSESATPESGPGSPAGSPTSTEEGTSESATPESGPGSEPATSGSETPGTSESATPESGPGTSTEPSEGSAPGTSTEPSEGSAPGTSTEPSEGSAPGTSTEPSEGSAPGTSTEPSEGSAPGTSTEPSEGSAPGSPAGSPTSTEEGTSTEPSEGSAPGTSESATPESGPGSEPATSGSETPGTSESATPESGPGSEPATSGSETPGTSESATPESGPGTSTEPSEGSAPGTSESATPESGPGSPAGSPTSTEEGSPAGSPTSTEEGSPAGSPTSTEEGTSESATPESGPGTSTEPSEGSAPGTSESATPESGPGSEPATSGSETPGTSESATPESGPGSEPATSGSETPGTSESATPESGPGTSTEPSEGSAPGSPAGSPTSTEEGTSESATPESGPGSEPATSGSETPGTSESATPESGPGSPAGSPTSTEEGSPAGSPTSTEEGTSTEPSEGSAPGTSESATPESGPGTSESATPESGPGTSESATPESGPGSEPATSGSETPGSEPATSGSETPGSPAGSPTSTEEGTSTEPSEGSAPGTSTEPSEGSAPGSEPATSGSETPGTSESATPESGPGTSTEPSEGSAPGFPTIPLSRLFDNAMLRAHRLHQLAFDTYQEFEEAYIPKEQKYSFLQNPQTSLCFSESIPTPSNREETQQKSNLELLRISLLLIQSWLEPVQFLRSVFANSLVYGASDSNVYDLLKDLEEGIQTLMGRLEDGSPRTGQIFKQTYSKFDTNSHNDDALLKNYGLLYCFRKDMDKVETFLRIVQCRSVEGSCGFGGGLGPVSGVPGGSEPATSGSETPGTSESATPESGPGSEPATSGSETPGSPAGSPTSTEEGTSTEPSEGSAPGSEPATSGSETPGSEPATSGSETPGSEPATSGSETPGTSTEPSEGSAPGTSESATPESGPGSEPATSGSETPGTSTEPSEGSAP

SEQ ID NO: 802 - DNA, 3786 bp, Artificial Sequence
  Description of Artificial Sequence: Synthetic polynucleotide
atggctgaacctgctggctctccaacctccactgaggaaggtaccccgggtagcggtactgcttcttcctctccaggtagctctaccccttctggtgcaaccggctctccaggtgcttctccgggcaccagctctaccggttctccaggtagcccggctggctctcctacctctactgaggaaggtacttctgaaagcgctactcctgagtctggtccaggtacctctactgaaccgtccgaaggtagcgctccaggtagcccagcaggctctccgacttccactgaggaaggtacttctactgaaccttccgaaggcagcgcaccaggtacctctactgaaccttctgagggcagcgctccaggtacttctgaaagcgctaccccggaatctggcccaggtagcgaaccggctacttctggttctgaaaccccaggtagcgaaccggctacctccggttctgaaactccaggtagcccggcaggctctccgacctctactgaggaaggtacttctgaaagcgcaaccccggagtccggcccaggtacctctaccgaaccgtctgagggcagcgcaccaggtacttctaccgaaccgtccgagggtagcgcaccaggtagcccagcaggttctcctacctccaccgaggaaggtacttctaccgaaccgtccgagggtagcgcaccaggtacctctactgaaccttctgagggcagcgctccaggtacttctgaaagcgctaccccggagtccggtccaggtacttctactgaaccgtccgaaggtagcgcaccaggtacttctgaaagcgcaacccctgaatccggtccaggtagcgaaccggctacttctggctctgagactccaggtacttctaccgaaccgtccgaaggtagcgcaccaggtacttctactgaaccgtctgaaggtagcgcaccaggtacttctgaaagcgcaaccccggaatccggcccaggtacctctgaaagcgcaaccccggagtccggcccaggtagccctgctggctctccaacctccaccgaagaaggtacctctgaaagcgcaacccctgaatccggcccaggtagcgaaccggcaacctccggttctgaaaccccaggtacctctgaaagcgctactccggagtctggcccaggtacctctactgaaccgtctgagggtagcgctccaggtacttctactgaaccgtccgaaggtagcgcaccaggtacttctaccgaaccgtccgaaggcagcgctccaggtacctctactgaaccttccgagggcagcgctccaggtacctctaccgaaccttctgaaggtagcgcaccaggtacttctaccgaaccgtccgagggtagcgcaccaggtagcccagcaggttctcctacctccaccgaggaaggtacttctaccgaaccgtccgagggtagcgcaccaggtacctctgaaagcgcaactcctgagtctggcccaggtagcgaacctgctacctccggctctgagactccaggtacctctgaaagcgcaaccccggaatctggtccaggtagcgaacctgcaacctctggctctgaaaccccaggtacctctgaaagcgctactcctgaatctggcccaggtacttctactgaaccgtccgagggcagcgcaccaggtacttctgaaagcgctactcctgagtccggcccaggtagcccggctggctctccgacttccaccgaggaaggtagcccggctggctctccaacttctactgaagaaggtagcccggcaggctctccgacctctactgaggaaggtacttctgaaagcgcaaccccggagtccggcccaggtacctctaccgaaccgtctgagggcagcgcaccaggtacctctgaaagcgcaactcctgagtctggcccaggtagcgaacctgctacctccggctctgagactccaggtacctctgaaagcgcaaccccggaatctggtccaggtagcgaacctgcaacctctggctctgaaaccccaggtacctctgaaagcgctactcctgaatctggcccaggtacttctactgaaccgtccgagggcagcgcaccaggtagccctgctggctctccaacctccaccgaagaaggtacctctgaaagcgcaacccctgaatccggcccaggtagcgaaccggcaacctccggttctgaaaccccaggtacttctgaaagcgctactcctgagtccggcccaggtagcccggctggctctccgacttccaccgaggaaggtagcccggctggctctccaacttctactgaagaaggtacttctaccgaaccttccgagggcagcgcaccaggtacttctgaaagcgctacccctgagtccggcccaggtacttctgaaagcgctactcctgaatccggtccaggtacttctgaaagcgctaccccggaatctggcccaggtagcgaaccggctacttctggttctgaaaccccaggtagcgaaccggctacctccggttctgaaactccaggtagcccagcaggctctccgacttccactgaggaaggtacttctactgaaccttccgaaggcagcgcaccaggtacctctactgaaccttctgagggcagcgctccaggtagcgaacctgcaacctctggctctgaaaccccaggtacctctgaaagcgctactcctgaatctggcccaggtacttctactgaaccgtccgagggcagcgcaccaggttttccgactattccgctgtctcgtctgtttgataatgctatgctgcgtgcgcaccgtctgcaccagctggcctttgatacttaccaggaatttgaagaagcctacattcctaaagagcagaagtactctttcctgcaaaacccacagacttctctctgcttcagcgaatctattccgacgccttccaatcgcgaggaaactcagcaaaagtccaatctggaactactccgcatttctctgcttctgattcagagctggctagaaccagtgcaatttctgcgttccgtcttcgccaatagcctagtttatggcgcatccgacagcaacgtatacgatctcctgaaagatctcgaggaaggcattcagaccctgatgggtcgtctcgaggatggctctccgcgtactggtcagatcttcaagcagacttactctaaatttgatactaacagccacaatgacgatgcgcttctaaaaaactatggtctgctgtattgttttcgtaaagatatggacaaagttgaaaccttcctgcgtattgttcagtgtcgttccgttgagggcagctgtggtttctaaggtggcggcctgggcccggtgagcggcgtgccgggtggtagcgaaccggcaacttccggctctgaaaccccaggtacttctgaaagcgctactcctgagtctggcccaggtagcgaacctgctacctctggctctgaaaccccaggtagcccggcaggctctccgacttccaccgaggaaggtacctctactgaaccttctgagggtagcgctccaggtagcgaaccggcaacctctggctctgaaaccccaggtagcgaacctgctacctccggctctgaaactccaggtagcgaaccggctacttccggttctgaaactccaggtacctctaccgaaccttccgaaggcagcgcaccaggtacttctgaaagcgcaacccctgaatccggtccaggtagcgaaccggctacttctggctctgagactccaggtacttctaccgaaccgtccgaaggtagcgcacca

SEQ ID NO: 803 - protein, 1261 aa, Artificial Sequence
  Description of Artificial Sequence: Synthetic polypeptide
MAEPAGSPTSTEEGTPGSGTASSSPGSSTPSGATGSPGASPGTSSTGSPGSPAGSPTSTEEGTSESATPESGPGTSTEPSEGSAPGSPAGSPTSTEEGTSTEPSEGSAPGTSTEPSEGSAPGTSESATPESGPGSEPATSGSETPGSEPATSGSETPGSPAGSPTSTEEGTSESATPESGPGTSTEPSEGSAPGTSTEPSEGSAPGSPAGSPTSTEEGTSTEPSEGSAPGTSTEPSEGSAPGTSESATPESGPGTSTEPSEGSAPGTSESATPESGPGSEPATSGSETPGTSTEPSEGSAPGTSTEPSEGSAPGTSESATPESGPGTSESATPESGPGSPAGSPTSTEEGTSESATPESGPGSEPATSGSETPGTSESATPESGPGTSTEPSEGSAPGTSTEPSEGSAPGTSTEPSEGSAPGTSTEPSEGSAPGTSTEPSEGSAPGTSTEPSEGSAPGSPAGSPTSTEEGTSTEPSEGSAPGTSESATPESGPGSEPATSGSETPGTSESATPESGPGSEPATSGSETPGTSESATPESGPGTSTEPSEGSAPGTSESATPESGPGSPAGSPTSTEEGSPAGSPTSTEEGSPAGSPTSTEEGTSESATPESGPGTSTEPSEGSAPGTSESATPESGPGSEPATSGSETPGTSESATPESGPGSEPATSGSETPGTSESATPESGPGTSTEPSEGSAPGSPAGSPTSTEEGTSESATPESGPGSEPATSGSETPGTSESATPESGPGSPAGSPTSTEEGSPAGSPTSTEEGTSTEPSEGSAPGTSESATPESGPGTSESATPESGPGTSESATPESGPGSEPATSGSETPGSEPATSGSETPGSPAGSPTSTEEGTSTEPSEGSAPGTSTEPSEGSAPGSEPATSGSETPGTSESATPESGPGTSTEPSEGSAPGFPTIPLSRLFDNAMLRAHRLHQLAFDTYQEFEEAYIPKEQKYSFLQNPQTSLCFSESIPTPSNREETQQKSNLELLRISLLLIQSWLEPVQFLRSVFANSLVYGASDSNVYDLLKDLEEGIQTLMGRLEDGSPRTGQIFKQTYSKFDTNSHNDDALLKNYGLLYCFRKDMDKVETFLRIVQCRSVEGSCGFGAPLGLRLRGGGGSEPATSGSETPGTSESATPESGPGSEPATSGSETPGSPAGSPTSTEEGTSTEPSEGSAPGSEPATSGSETPGSEPATSGSETPGSEPATSGSETPGTSTEPSEGSAPGTSESATPESGPGSEPATSGSETPGTSTEPSEGSAP

SEQ ID NO: 804 - DNA, 3786 bp, Artificial Sequence
  Description of Artificial Sequence: Synthetic polynucleotide
atggctgaacctgctggctctccaacctccactgaggaaggtaccccgggtagcggtactgcttcttcctctccaggtagctctaccccttctggtgcaaccggctctccaggtgcttctccgggcaccagctctaccggttctccaggtagcccggctggctctcctacctctactgaggaaggtacttctgaaagcgctactcctgagtctggtccaggtacctctactgaaccgtccgaaggtagcgctccaggtagcccagcaggctctccgacttccactgaggaaggtacttctactgaaccttccgaaggcagcgcaccaggtacctctactgaaccttctgagggcagcgctccaggtacttctgaaagcgctaccccggaatctggcccaggtagcgaaccggctacttctggttctgaaaccccaggtagcgaaccggctacctccggttctgaaactccaggtagcccggcaggctctccgacctctactgaggaaggtacttctgaaagcgcaaccccggagtccggcccaggtacctctaccgaaccgtctgagggcagcgcaccaggtacttctaccgaaccgtccgagggtagcgcaccaggtagcccagcaggttctcctacctccaccgaggaaggtacttctaccgaaccgtccgagggtagcgcaccaggtacctctactgaaccttctgagggcagcgctccaggtacttctgaaagcgctaccccggagtccggtccaggtacttctactgaaccgtccgaaggtagcgcaccaggtacttctgaaagcgcaacccctgaatccggtccaggtagcgaaccggctacttctggctctgagactccaggtacttctaccgaaccgtccgaaggtagcgcaccaggtacttctactgaaccgtctgaaggtagcgcaccaggtacttctgaaagcgcaaccccggaatccggcccaggtacctctgaaagcgcaaccccggagtccggcccaggtagccctgctggctctccaacctccaccgaagaaggtacctctgaaagcgcaacccctgaatccggcccaggtagcgaaccggcaacctccggttctgaaaccccaggtacctctgaaagcgctactccggagtctggcccaggtacctctactgaaccgtctgagggtagcgctccaggtacttctactgaaccgtccgaaggtagcgcaccaggtacttctaccgaaccgtccgaaggcagcgctccaggtacctctactgaaccttccgagggcagcgctccaggtacctctaccgaaccttctgaaggtagcgcaccaggtacttctaccgaaccgtccgagggtagcgcaccaggtagcccagcaggttctcctacctccaccgaggaaggtacttctaccgaaccgtccgagggtagcgcaccaggtacctctgaaagcgcaactcctgagtctggcccaggtagcgaacctgctacctccggctctgagactccaggtacctctgaaagcgcaaccccggaatctggtccaggtagcgaacctgcaacctctggctctgaaaccccaggtacctctgaaagcgctactcctgaatctggcccaggtacttctactgaaccgtccgagggcagcgcaccaggtacttctgaaagcgctactcctgagtccggcccaggtagcccggctggctctccgacttccaccgaggaaggtagcccggctggctctccaacttctactgaagaaggtagcccggcaggctctccgacctctactgaggaaggtacttctgaaagcgcaaccccggagtccggcccaggtacctctaccgaaccgtctgagggcagcgcaccaggtacctctgaaagcgcaactcctgagtctggcccaggtagcgaacctgctacctccggctctgagactccaggtacctctgaaagcgcaaccccggaatctggtccaggtagcgaacctgcaacctctggctctgaaaccccaggtacctctgaaagcgctactcctgaatctggcccaggtacttctactgaaccgtccgagggcagcgcaccaggtagccctgctggctctccaacctccaccgaagaaggtacctctgaaagcgcaacccctgaatccggcccaggtagcgaaccggcaacctccggttctgaaaccccaggtacttctgaaagcgctactcctgagtccggcccaggtagcccggctggctctccgacttccaccgaggaaggtagcccggctggctctccaacttctactgaagaaggtacttctaccgaaccttccgagggcagcgcaccaggtacttctgaaagcgctacccctgagtccggcccaggtacttctgaaagcgctactcctgaatccggtccaggtacttctgaaagcgctaccccggaatctggcccaggtagcgaaccggctacttctggttctgaaaccccaggtagcgaaccggctacctccggttctgaaactccaggtagcccagcaggctctccgacttccactgaggaaggtacttctactgaaccttccgaaggcagcgcaccaggtacctctactgaaccttctgagggcagcgctccaggtagcgaacctgcaacctctggctctgaaaccccaggtacctctgaaagcgctactcctgaatctggcccaggtacttctactgaaccgtccgagggcagcgcaccaggttttccgactattccgctgtctcgtctgtttgataatgctatgctgcgtgcgcaccgtctgcaccagctggcctttgatacttaccaggaatttgaagaagcctacattcctaaagagcagaagtactctttcctgcaaaacccacagacttctctctgcttcagcgaatctattccgacgccttccaatcgcgaggaaactcagcaaaagtccaatctggaactactccgcatttctctgcttctgattcagagctggctagaaccagtgcaatttctgcgttccgtcttcgccaatagcctagtttatggcgcatccgacagcaacgtatacgatctcctgaaagatctcgaggaaggcattcagaccctgatgggtcgtctcgaggatggctctccgcgtactggtcagatcttcaagcagacttactctaaatttgatactaacagccacaatgacgatgcgcttctaaaaaactatggtctgctgtattgttttcgtaaagatatggacaaagttgaaaccttcctgcgtattgttcagtgtcgttccgttgagggcagctgtggtttctaaggtgcgccgctgggcctgcgcctgcgcggcggcggtggtagcgaaccggcaacttccggctctgaaaccccaggtacttctgaaagcgctactcctgagtctggcccaggtagcgaacctgctacctctggctctgaaaccccaggtagcccggcaggctctccgacttccaccgaggaaggtacctctactgaaccttctgagggtagcgctccaggtagcgaaccggcaacctctggctctgaaaccccaggtagcgaacctgctacctccggctctgaaactccaggtagcgaaccggctacttccggttctgaaactccaggtacctctaccgaaccttccgaaggcagcgcaccaggtacttctgaaagcgcaacccctgaatccggtccaggtagcgaaccggctacttctggctctgagactccaggtacttctaccgaaccgtccgaaggtagcgcacca

SEQ ID NO: 805 - protein, 1405 aa, Artificial Sequence
  Description of Artificial Sequence: Synthetic polypeptide
MAEPAGSPTSTEEGTPGSGTASSSPGSSTPSGATGSPGASPGTSSTGSPGSPAGSPTSTEEGTSESATPESGPGTSTEPSEGSAPGSPAGSPTSTEEGTSTEPSEGSAPGTSTEPSEGSAPGTSESATPESGPGSEPATSGSETPGSEPATSGSETPGSPAGSPTSTEEGTSESATPESGPGTSTEPSEGSAPGTSTEPSEGSAPGSPAGSPTSTEEGTSTEPSEGSAPGTSTEPSEGSAPGTSESATPESGPGTSTEPSEGSAPGTSESATPESGPGSEPATSGSETPGTSTEPSEGSAPGTSTEPSEGSAPGTSESATPESGPGTSESATPESGPGSPAGSPTSTEEGTSESATPESGPGSEPATSGSETPGTSESATPESGPGTSTEPSEGSAPGTSTEPSEGSAPGTSTEPSEGSAPGTSTEPSEGSAPGTSTEPSEGSAPGTSTEPSEGSAPGSPAGSPTSTEEGTSTEPSEGSAPGTSESATPESGPGSEPATSGSETPGTSESATPESGPGSEPATSGSETPGTSESATPESGPGTSTEPSEGSAPGTSESATPESGPGSPAGSPTSTEEGSPAGSPTSTEEGSPAGSPTSTEEGTSESATPESGPGTSTEPSEGSAPGTSESATPESGPGSEPATSGSETPGTSESATPESGPGSEPATSGSETPGTSESATPESGPGTSTEPSEGSAPGSPAGSPTSTEEGTSESATPESGPGSEPATSGSETPGTSESATPESGPGSPAGSPTSTEEGSPAGSPTSTEEGTSTEPSEGSAPGTSESATPESGPGTSESATPESGPGTSESATPESGPGSEPATSGSETPGSEPATSGSETPGSPAGSPTSTEEGTSTEPSEGSAPGTSTEPSEGSAPGSEPATSGSETPGTSESATPESGPGTSTEPSEGSAPGFPTIPLSRLFDNAMLRAHRLHQLAFDTYQEFEEAYIPKEQKYSFLQNPQTSLCFSESIPTPSNREETQQKSNLELLRISLLLIQSWLEPVQFLRSVFANSLVYGASDSNVYDLLKDLEEGIQTLMGRLEDGSPRTGQIFKQTYSKFDTNSHNDDALLKNYGLLYCFRKDMDKVETFLRIVQCRSVEGSCGFGLTPRSLLVGGGGTSESATPESGPGSEPATSGSETPGTSESATPESGPGSEPATSGSETPGTSESATPESGPGTSTEPSEGSAPGSPAGSPTSTEEGTSESATPESGPGSEPATSGSETPGTSESATPESGPGSPAGSPTSTEEGSPAGSPTSTEEGTSTEPSEGSAPGTSESATPESGPGTSESATPESGPGTSESATPESGPGSEPATSGSETPGSEPATSGSETPGSPAGSPTSTEEGTSTEPSEGSAPGTSTEPSEGSAPGSEPATSGSETPGTSESATPESGPGTSTEPSEGSAP

SEQ ID NO: 806 - DNA, 4218 bp, Artificial Sequence
  Description of Artificial Sequence: Synthetic polynucleotide
atggctgaacctgctggctctccaacctccactgaggaaggtaccccgggtagcggtactgcttcttcctctccaggtagctctaccccttctggtgcaaccggctctccaggtgcttctccgggcaccagctctaccggttctccaggtagcccggctggctctcctacctctactgaggaaggtacttctgaaagcgctactcctgagtctggtccaggtacctctactgaaccgtccgaaggtagcgctccaggtagcccagcaggctctccgacttccactgaggaaggtacttctactgaaccttccgaaggcagcgcaccaggtacctctactgaaccttctgagggcagcgctccaggtacttctgaaagcgctaccccggaatctggcccaggtagcgaaccggctacttctggttctgaaaccccaggtagcgaaccggctacctccggttctgaaactccaggtagcccggcaggctctccgacctctactgaggaaggtacttctgaaagcgcaaccccggagtccggcccaggtacctctaccgaaccgtctgagggcagcgcaccaggtacttctaccgaaccgtccgagggtagcgcaccaggtagcccagcaggttctcctacctccaccgaggaaggtacttctaccgaaccgtccgagggtagcgcaccaggtacctctactgaaccttctgagggcagcgctccaggtacttctgaaagcgctaccccggagtccggtccaggtacttctactgaaccgtccgaaggtagcgcaccaggtacttctgaaagcgcaacccctgaatccggtccaggtagcgaaccggctacttctggctctgagactccaggtacttctaccgaaccgtccgaaggtagcgcaccaggtacttctactgaaccgtctgaaggtagcgcaccaggtacttctgaaagcgcaaccccggaatccggcccaggtacctctgaaagcgcaaccccggagtccggcccaggtagccctgctggctctccaacctccaccgaagaaggtacctctgaaagcgcaacccctgaatccggcccaggtagcgaaccggcaacctccggttctgaaaccccaggtacctctgaaagcgctactccggagtctggcccaggtacctctactgaaccgtctgagggtagcgctccaggtacttctactgaaccgtccgaaggtagcgcaccaggtacttctaccgaaccgtccgaaggcagcgctccaggtacctctactgaaccttccgagggcagcgctccaggtacctctaccgaaccttctgaaggtagcgcaccaggtacttctaccgaaccgtccgagggtagcgcaccaggtagcccagcaggttctcctacctccaccgaggaaggtacttctaccgaaccgtccgagggtagcgcaccaggtacctctgaaagcgcaactcctgagtctggcccaggtagcgaacctgctacctccggctctgagactccaggtacctctgaaagcgcaaccccggaatctggtccaggtagcgaacctgcaacctctggctctgaaaccccaggtacctctgaaagcgctactcctgaatctggcccaggtacttctactgaaccgtccgagggcagcgcaccaggtacttctgaaagcgctactcctgagtccggcccaggtagcccggctggctctccgacttccaccgaggaaggtagcccggctggctctccaacttctactgaagaaggtagcccggcaggctctccgacctctactgaggaaggtacttctgaaagcgcaaccccggagtccggcccaggtacctctaccgaaccgtctgagggcagcgcaccaggtacctctgaaagcgcaactcctgagtctggcccaggtagcgaacctgctacctccggctctgagactccaggtacctctgaaagcgcaaccccggaatctggtccaggtagcgaacctgcaacctctggctctgaaaccccaggtacctctgaaagcgctactcctgaatctggcccaggtacttctactgaaccgtccgagggcagcgcaccaggtagccctgctggctctccaacctccaccgaagaaggtacctctgaaagcgcaacccctgaatccggcccaggtagcgaaccggcaacctccggttctgaaaccccaggtacttctgaaagcgctactcctgagtccggcccaggtagcccggctggctctccgacttccaccgaggaaggtagcccggctggctctccaacttctactgaagaaggtacttctaccgaaccttccgagggcagcgcaccaggtacttctgaaagcgctacccctgagtccggcccaggtacttctgaaagcgctactcctgaatccggtccaggtacttctgaaagcgctaccccggaatctggcccaggtagcgaaccggctacttctggttctgaaaccccaggtagcgaaccggctacctccggttctgaaactccaggtagcccagcaggctctccgacttccactgaggaaggtacttctactgaaccttccgaaggcagcgcaccaggtacctctactgaaccttctgagggcagcgctccaggtagcgaacctgcaacctctggctctgaaaccccaggtacctctgaaagcgctactcctgaatctggcccaggtacttctactgaaccgtccgagggcagcgcaccaggttttccgactattccgctgtctcgtctgtttgataatgctatgctgcgtgcgcaccgtctgcaccagctggcctttgatacttaccaggaatttgaagaagcctacattcctaaagagcagaagtactctttcctgcaaaacccacagacttctctctgcttcagcgaatctattccgacgccttccaatcgcgaggaaactcagcaaaagtccaatctggaactactccgcatttctctgcttctgattcagagctggctagaaccagtgcaatttctgcgttccgtcttcgccaatagcctagtttatggcgcatccgacagcaacgtatacgatctcctgaaagatctcgaggaaggcattcagaccctgatgggtcgtctcgaggatggctctccgcgtactggtcagatcttcaagcagacttactctaaatttgatactaacagccacaatgacgatgcgcttctaaaaaactatggtctgctgtattgttttcgtaaagatatggacaaagttgaaaccttcctgcgtattgttcagtgtcgttccgttgagggcagctgtggtttctaaggtctgaccccgcgcagcctgctggtgggcggcggtggtacctctgaaagcgcaactcctgagtctggcccaggtagcgaacctgctacctccggctctgagactccaggtacctctgaaagcgcaaccccggaatctggtccaggtagcgaacctgcaacctctggctctgaaaccccaggtacctctgaaagcgctactcctgaatctggcccaggtacttctactgaaccgtccgagggcagcgcaccaggtagccctgctggctctccaacctccaccgaagaaggtacctctgaaagcgcaacccctgaatccggcccaggtagcgaaccggcaacctccggttctgaaaccccaggtacttctgaaagcgctactcctgagtccggcccaggtagcccggctggctctccgacttccaccgaggaaggtagcccggctggctctccaacttctactgaagaaggtacttctaccgaaccttccgagggcagcgcaccaggtacttctgaaagcgctacccctgagtccggcccaggtacttctgaaagcgctactcctgaatccggtccaggtacttctgaaagcgctaccccggaatctggcccaggtagcgaaccggctacttctggttctgaaaccccaggtagcgaaccggctacctccggttctgaaactccaggtagcccagcaggctctccgacttccactgaggaaggtacttctactgaaccttccgaaggcagcgcaccaggtacctctactgaaccttctgagggcagcgctccaggtagcgaacctgcaacctctggctctgaaaccccaggtacctctgaaagcgctactcctgaatctggcccaggtacttctactgaaccgtccgagggcagcgcacca

SEQ ID NO: 807 - protein, 1405 aa, Artificial Sequence
  Description of Artificial Sequence: Synthetic polypeptide
MAEPAGSPTSTEEGTPGSGTASSSPGSSTPSGATGSPGASPGTSSTGSPGSPAGSPTSTEEGTSESATPESGPGTSTEPSEGSAPGSPAGSPTSTEEGTSTEPSEGSAPGTSTEPSEGSAPGTSESATPESGPGSEPATSGSETPGSEPATSGSETPGSPAGSPTSTEEGTSESATPESGPGTSTEPSEGSAPGTSTEPSEGSAPGSPAGSPTSTEEGTSTEPSEGSAPGTSTEPSEGSAPGTSESATPESGPGTSTEPSEGSAPGTSESATPESGPGSEPATSGSETPGTSTEPSEGSAPGTSTEPSEGSAPGTSESATPESGPGTSESATPESGPGSPAGSPTSTEEGTSESATPESGPGSEPATSGSETPGTSESATPESGPGTSTEPSEGSAPGTSTEPSEGSAPGTSTEPSEGSAPGTSTEPSEGSAPGTSTEPSEGSAPGTSTEPSEGSAPGSPAGSPTSTEEGTSTEPSEGSAPGTSESATPESGPGSEPATSGSETPGTSESATPESGPGSEPATSGSETPGTSESATPESGPGTSTEPSEGSAPGTSESATPESGPGSPAGSPTSTEEGSPAGSPTSTEEGSPAGSPTSTEEGTSESATPESGPGTSTEPSEGSAPGTSESATPESGPGSEPATSGSETPGTSESATPESGPGSEPATSGSETPGTSESATPESGPGTSTEPSEGSAPGSPAGSPTSTEEGTSESATPESGPGSEPATSGSETPGTSESATPESGPGSPAGSPTSTEEGSPAGSPTSTEEGTSTEPSEGSAPGTSESATPESGPGTSESATPESGPGTSESATPESGPGSEPATSGSETPGSEPATSGSETPGSPAGSPTSTEEGTSTEPSEGSAPGTSTEPSEGSAPGSEPATSGSETPGTSESATPESGPGTSTEPSEGSAPGFPTIPLSRLFDNAMLRAHRLHQLAFDTYQEFEEAYIPKEQKYSFLQNPQTSLCFSESIPTPSNREETQQKSNLELLRISLLLIQSWLEPVQFLRSVFANSLVYGASDSNVYDLLKDLEEGIQTLMGRLEDGSPRTGQIFKQTYSKFDTNSHNDDALLKNYGLLYCFRKDMDKVETFLRIVQCRSVEGSCGFGGGKLTRVVGGGGTSESATPESGPGSEPATSGSETPGTSESATPESGPGSEPATSGSETPGTSESATPESGPGTSTEPSEGSAPGSPAGSPTSTEEGTSESATPESGPGSEPATSGSETPGTSESATPESGPGSPAGSPTSTEEGSPAGSPTSTEEGTSTEPSEGSAPGTSESATPESGPGTSESATPESGPGTSESATPESGPGSEPATSGSETPGSEPATSGSETPGSPAGSPTSTEEGTSTEPSEGSAPGTSTEPSEGSAPGSEPATSGSETPGTSESATPESGPGTSTEPSEGSAP

SEQ ID NO: 808 - DNA, 4218 bp, Artificial Sequence
  Description of Artificial Sequence: Synthetic polynucleotide
atggctgaacctgctggctctccaacctccactgaggaaggtaccccgggtagcggtactgcttcttcctctccaggtagctctaccccttctggtgcaaccggctctccaggtgcttctccgggcaccagctctaccggttctccaggtagcccggctggctctcctacctctactgaggaaggtacttctgaaagcgctactcctgagtctggtccaggtacctctactgaaccgtccgaaggtagcgctccaggtagcccagcaggctctccgacttccactgaggaaggtacttctactgaaccttccgaaggcagcgcaccaggtacctctactgaaccttctgagggcagcgctccaggtacttctgaaagcgctaccccggaatctggcccaggtagcgaaccggctacttctggttctgaaaccccaggtagcgaaccggctacctccggttctgaaactccaggtagcccggcaggctctccgacctctactgaggaaggtacttctgaaagcgcaaccccggagtccggcccaggtacctctaccgaaccgtctgagggcagcgcaccaggtacttctaccgaaccgtccgagggtagcgcaccaggtagcccagcaggttctcctacctccaccgaggaaggtacttctaccgaaccgtccgagggtagcgcaccaggtacctctactgaaccttctgagggcagcgctccaggtacttctgaaagcgctaccccggagtccggtccaggtacttctactgaaccgtccgaaggtagcgcaccaggtacttctgaaagcgcaacccctgaatccggtccaggtagcgaaccggctacttctggctctgagactccaggtacttctaccgaaccgtccgaaggtagcgcaccaggtacttctactgaaccgtctgaaggtagcgcaccaggtacttctgaaagcgcaaccccggaatccggcccaggtacctctgaaagcgcaaccccggagtccggcccaggtagccctgctggctctccaacctccaccgaagaaggtacctctgaaagcgcaacccctgaatccggcccaggtagcgaaccggcaacctccggttctgaaaccccaggtacctctgaaagcgctactccggagtctggcccaggtacctctactgaaccgtctgagggtagcgctccaggtacttctactgaaccgtccgaaggtagcgcaccaggtacttctaccgaaccgtccgaaggcagcgctccaggtacctctactgaaccttccgagggcagcgctccaggtacctctaccgaaccttctgaaggtagcgcaccaggtacttctaccgaaccgtccgagggtagcgcaccaggtagcccagcaggttctcctacctccaccgaggaaggtacttctaccgaaccgtccgagggtagcgcaccaggtacctctgaaagcgcaactcctgagtctggcccaggtagcgaacctgctacctccggctctgagactccaggtacctctgaaagcgcaaccccggaatctggtccaggtagcgaacctgcaacctctggctctgaaaccccaggtacctctgaaagcgctactcctgaatctggcccaggtacttctactgaaccgtccgagggcagcgcaccaggtacttctgaaagcgctactcctgagtccggcccaggtagcccggctggctctccgacttccaccgaggaaggtagcccggctggctctccaacttctactgaagaaggtagcccggcaggctctccgacctctactgaggaaggtacttctgaaagcgcaaccccggagtccggcccaggtacctctaccgaaccgtctgagggcagcgcaccaggtacctctgaaagcgcaactcctgagtctggcccaggtagcgaacctgctacctccggctctgagactccaggtacctctgaaagcgcaaccccggaatctggtccaggtagcgaacctgcaacctctggctctgaaaccccaggtacctctgaaagcgctactcctgaatctggcccaggtacttctactgaaccgtccgagggcagcgcaccaggtagccctgctggctctccaacctccaccgaagaaggtacctctgaaagcgcaacccctgaatccggcccaggtagcgaaccggcaacctccggttctgaaaccccaggtacttctgaaagcgctactcctgagtccggcccaggtagcccggctggctctccgacttccaccgaggaaggtagcccggctggctctccaacttctactgaagaaggtacttctaccgaaccttccgagggcagcgcaccaggtacttctgaaagcgctacccctgagtccggcccaggtacttctgaaagcgctactcctgaatccggtccaggtacttctgaaagcgctaccccggaatctggcccaggtagcgaaccggctacttctggttctgaaaccccaggtagcgaaccggctacctccggttctgaaactccaggtagcccagcaggctctccgacttccactgaggaaggtacttctactgaaccttccgaaggcagcgcaccaggtacctctactgaaccttctgagggcagcgctccaggtagcgaacctgcaacctctggctctgaaaccccaggtacctctgaaagcgctactcctgaatctggcccaggtacttctactgaaccgtccgagggcagcgcaccaggttttccgactattccgctgtctcgtctgtttgataatgctatgctgcgtgcgcaccgtctgcaccagctggcctttgatacttaccaggaatttgaagaagcctacattcctaaagagcagaagtactctttcctgcaaaacccacagacttctctctgcttcagcgaatctattccgacgccttccaatcgcgaggaaactcagcaaaagtccaatctggaactactccgcatttctctgcttctgattcagagctggctagaaccagtgcaatttctgcgttccgtcttcgccaatagcctagtttatggcgcatccgacagcaacgtatacgatctcctgaaagatctcgaggaaggcattcagaccctgatgggtcgtctcgaggatggctctccgcgtactggtcagatcttcaagcagacttactctaaatttgatactaacagccacaatgacgatgcgcttctaaaaaactatggtctgctgtattgttttcgtaaagatatggacaaagttgaaaccttcctgcgtattgttcagtgtcgttccgttgagggcagctgtggtttctaaggtggcggcaaactgacccgcgtggtgggcggcggtggtacctctgaaagcgcaactcctgagtctggcccaggtagcgaacctgctacctccggctctgagactccaggtacctctgaaagcgcaaccccggaatctggtccaggtagcgaacctgcaacctctggctctgaaaccccaggtacctctgaaagcgctactcctgaatctggcccaggtacttctactgaaccgtccgagggcagcgcaccaggtagccctgctggctctccaacctccaccgaagaaggtacctctgaaagcgcaacccctgaatccggcccaggtagcgaaccggcaacctccggttctgaaaccccaggtacttctgaaagcgctactcctgagtccggcccaggtagcccggctggctctccgacttccaccgaggaaggtagcccggctggctctccaacttctactgaagaaggtacttctaccgaaccttccgagggcagcgcaccaggtacttctgaaagcgctacccctgagtccggcccaggtacttctgaaagcgctactcctgaatccggtccaggtacttctgaaagcgctaccccggaatctggcccaggtagcgaaccggctacttctggttctgaaaccccaggtagcgaaccggctacctccggttctgaaactccaggtagcccagcaggctctccgacttccactgaggaaggtacttctactgaaccttccgaaggcagcgcaccaggtacctctactgaaccttctgagggcagcgctccaggtagcgaacctgcaacctctggctctgaaaccccaggtacctctgaaagcgctactcctgaatctggcccaggtacttctactgaaccgtccgagggcagcgcacca

SEQ ID NO: 809 - protein, 1405 aa, Artificial Sequence
  Description of Artificial Sequence: Synthetic polypeptide
MAEPAGSPTSTEEGTPGSGTASSSPGSSTPSGATGSPGASPGTSSTGSPGSPAGSPTSTEEGTSESATPESGPGTSTEPSEGSAPGSPAGSPTSTEEGTSTEPSEGSAPGTSTEPSEGSAPGTSESATPESGPGSEPATSGSETPGSEPATSGSETPGSPAGSPTSTEEGTSESATPESGPGTSTEPSEGSAPGTSTEPSEGSAPGSPAGSPTSTEEGTSTEPSEGSAPGTSTEPSEGSAPGTSESATPESGPGTSTEPSEGSAPGTSESATPESGPGSEPATSGSETPGTSTEPSEGSAPGTSTEPSEGSAPGTSESATPESGPGTSESATPESGPGSPAGSPTSTEEGTSESATPESGPGSEPATSGSETPGTSESATPESGPGTSTEPSEGSAPGTSTEPSEGSAPGTSTEPSEGSAPGTSTEPSEGSAPGTSTEPSEGSAPGTSTEPSEGSAPGSPAGSPTSTEEGTSTEPSEGSAPGTSESATPESGPGSEPATSGSETPGTSESATPESGPGSEPATSGSETPGTSESATPESGPGTSTEPSEGSAPGTSESATPESGPGSPAGSPTSTEEGSPAGSPTSTEEGSPAGSPTSTEEGTSESATPESGPGTSTEPSEGSAPGTSESATPESGPGSEPATSGSETPGTSESATPESGPGSEPATSGSETPGTSESATPESGPGTSTEPSEGSAPGSPAGSPTSTEEGTSESATPESGPGSEPATSGSETPGTSESATPESGPGSPAGSPTSTEEGSPAGSPTSTEEGTSTEPSEGSAPGTSESATPESGPGTSESATPESGPGTSESATPESGPGSEPATSGSETPGSEPATSGSETPGSPAGSPTSTEEGTSTEPSEGSAPGTSTEPSEGSAPGSEPATSGSETPGTSESATPESGPGTSTEPSEGSAPGFPTIPLSRLFDNAMLRAHRLHQLAFDTYQEFEEAYIPKEQKYSFLQNPQTSLCFSESIPTPSNREETQQKSNLELLRISLLLIQSWLEPVQFLRSVFANSLVYGASDSNVYDLLKDLEEGIQTLMGRLEDGSPRTGQIFKQTYSKFDTNSHNDDALLKNYGLLYCFRKDMDKVETFLRIVQCRSVEGSCGFGGGLGPVSGVPGGTSESATPESGPGSEPATSGSETPGTSESATPESGPGSEPATSGSETPGTSESATPESGPGTSTEPSEGSAPGSPAGSPTSTEEGTSESATPESGPGSEPATSGSETPGTSESATPESGPGSPAGSPTSTEEGSPAGSPTSTEEGTSTEPSEGSAPGTSESATPESGPGTSESATPESGPGTSESATPESGPGSEPATSGSETPGSEPATSGSETPGSPAGSPTSTEEGTSTEPSEGSAPGTSTEPSEGSAPGSEPATSGSETPGTSESATPESGPGTSTEPSEGSAP

SEQ ID NO: 810 - DNA, 4218 bp, Artificial Sequence
  Description of Artificial Sequence: Synthetic polynucleotide
atggctgaacctgctggctctccaacctccactgaggaaggtaccccgggtagcggtactgcttcttcctctccaggtagctctaccccttctggtgcaaccggctctccaggtgcttctccgggcaccagctctaccggttctccaggtagcccggctggctctcctacctctactgaggaaggtacttctgaaagcgctactcctgagtctggtccaggtacctctactgaaccgtccgaaggtagcgctccaggtagcccagcaggctctccgacttccactgaggaaggtacttctactgaaccttccgaaggcagcgcaccaggtacctctactgaaccttctgagggcagcgctccaggtacttctgaaagcgctaccccggaatctggcccaggtagcgaaccggctacttctggttctgaaaccccaggtagcgaaccggctacctccggttctgaaactccaggtagcccggcaggctctccgacctctactgaggaaggtacttctgaaagcgcaaccccggagtccggcccaggtacctctaccgaaccgtctgagggcagcgcaccaggtacttctaccgaaccgtccgagggtagcgcaccaggtagcccagcaggttctcctacctccaccgaggaaggtacttctaccgaaccgtccgagggtagcgcaccaggtacctctactgaaccttctgagggcagcgctccaggtacttctgaaagcgctaccccggagtccggtccaggtacttctactgaaccgtccgaaggtagcgcaccaggtacttctgaaagcgcaacccctgaatccggtccaggtagcgaaccggctacttctggctctgagactccaggtacttctaccgaaccgtccgaaggtagcgcaccaggtacttctactgaaccgtctgaaggtagcgcaccaggtacttctgaaagcgcaaccccggaatccggcccaggtacctctgaaagcgcaaccccggagtccggcccaggtagccctgctggctctccaacctccaccgaagaaggtacctctgaaagcgcaacccctgaatccggcccaggtagcgaaccggcaacctccggttctgaaaccccaggtacctctgaaagcgctactccggagtctggcccaggtacctctactgaaccgtctgagggtagcgctccaggtacttctactgaaccgtccgaaggtagcgcaccaggtacttctaccgaaccgtccgaaggcagcgctccaggtacctctactgaaccttccgagggcagcgctccaggtacctctaccgaaccttctgaaggtagcgcaccaggtacttctaccgaaccgtccgagggtagcgcaccaggtagcccagcaggttctcctacctccaccgaggaaggtacttctaccgaaccgtccgagggtagcgcaccaggtacctctgaaagcgcaactcctgagtctggcccaggtagcgaacctgctacctccggctctgagactccaggtacctctgaaagcgcaaccccggaatctggtccaggtagcgaacctgcaacctctggctctgaaaccccaggtacctctgaaagcgctactcctgaatctggcccaggtacttctactgaaccgtccgagggcagcgcaccaggtacttctgaaagcgctactcctgagtccggcccaggtagcccggctggctctccgacttccaccgaggaaggtagcccggctggctctccaacttctactgaagaaggtagcccggcaggctctccgacctctactgaggaaggtacttctgaaagcgcaaccccggagtccggcccaggtacctctaccgaaccgtctgagggcagcgcaccaggtacctctgaaagcgcaactcctgagtctggcccaggtagcgaacctgctacctccggctctgagactccaggtacctctgaaagcgcaaccccggaatctggtccaggtagcgaacctgcaacctctggctctgaaaccccaggtacctctgaaagcgctactcctgaatctggcccaggtacttctactgaaccgtccgagggcagcgcaccaggtagccctgctggctctccaacctccaccgaagaaggtacctctgaaagcgcaacccctgaatccggcccaggtagcgaaccggcaacctccggttctgaaaccccaggtacttctgaaagcgctactcctgagtccggcccaggtagcccggctggctctccgacttccaccgaggaaggtagcccggctggctctccaacttctactgaagaaggtacttctaccgaaccttccgagggcagcgcaccaggtacttctgaaagcgctacccctgagtccggcccaggtacttctgaaagcgctactcctgaatccggtccaggtacttctgaaagcgctaccccggaatctggcccaggtagcgaaccggctacttctggttctgaaaccccaggtagcgaaccggctacctccggttctgaaactccaggtagcccagcaggctctccgacttccactgaggaaggtacttctactgaaccttccgaaggcagcgcaccaggtacctctactgaaccttctgagggcagcgctccaggtagcgaacctgcaacctctggctctgaaaccccaggtacctctgaaagcgctactcctgaatctggcccaggtacttctactgaaccgtccgagggcagcgcaccaggttttccgactattccgctgtctcgtctgtttgataatgctatgctgcgtgcgcaccgtctgcaccagctggcctttgatacttaccaggaatttgaagaagcctacattcctaaagagcagaagtactctttcctgcaaaacccacagacttctctctgcttcagcgaatctattccgacgccttccaatcgcgaggaaactcagcaaaagtccaatctggaactactccgcatttctctgcttctgattcagagctggctagaaccagtgcaatttctgcgttccgtcttcgccaatagcctagtttatggcgcatccgacagcaacgtatacgatctcctgaaagatctcgaggaaggcattcagaccctgatgggtcgtctcgaggatggctctccgcgtactggtcagatcttcaagcagacttactctaaatttgatactaacagccacaatgacgatgcgcttctaaaaaactatggtctgctgtattgttttcgtaaagatatggacaaagttgaaaccttcctgcgtattgttcagtgtcgttccgttgagggcagctgtggtttctaaggtggcggcctgggcccggtgagcggcgtgccgggtggtacctctgaaagcgcaactcctgagtctggcccaggtagcgaacctgctacctccggctctgagactccaggtacctctgaaagcgcaaccccggaatctggtccaggtagcgaacctgcaacctctggctctgaaaccccaggtacctctgaaagcgctactcctgaatctggcccaggtacttctactgaaccgtccgagggcagcgcaccaggtagccctgctggctctccaacctccaccgaagaaggtacctctgaaagcgcaacccctgaatccggcccaggtagcgaaccggcaacctccggttctgaaaccccaggtacttctgaaagcgctactcctgagtccggcccaggtagcccggctggctctccgacttccaccgaggaaggtagcccggctggctctccaacttctactgaagaaggtacttctaccgaaccttccgagggcagcgcaccaggtacttctgaaagcgctacccctgagtccggcccaggtacttctgaaagcgctactcctgaatccggtccaggtacttctgaaagcgctaccccggaatctggcccaggtagcgaaccggctacttctggttctgaaaccccaggtagcgaaccggctacctccggttctgaaactccaggtagcccagcaggctctccgacttccactgaggaaggtacttctactgaaccttccgaaggcagcgcaccaggtacctctactgaaccttctgagggcagcgctccaggtagcgaacctgcaacctctggctctgaaaccccaggtacctctgaaagcgctactcctgaatctggcccaggtacttctactgaaccgtccgagggcagcgcacca

SEQ ID NO: 811 - protein, 1405 aa, Artificial Sequence
  Description of Artificial Sequence: Synthetic polypeptide
MAEPAGSPTSTEEGTPGSGTASSSPGSSTPSGATGSPGASPGTSSTGSPGSPAGSPTSTEEGTSESATPESGPGTSTEPSEGSAPGSPAGSPTSTEEGTSTEPSEGSAPGTSTEPSEGSAPGTSESATPESGPGSEPATSGSETPGSEPATSGSETPGSPAGSPTSTEEGTSESATPESGPGTSTEPSEGSAPGTSTEPSEGSAPGSPAGSPTSTEEGTSTEPSEGSAPGTSTEPSEGSAPGTSESATPESGPGTSTEPSEGSAPGTSESATPESGPGSEPATSGSETPGTSTEPSEGSAPGTSTEPSEGSAPGTSESATPESGPGTSESATPESGPGSPAGSPTSTEEGTSESATPESGPGSEPATSGSETPGTSESATPESGPGTSTEPSEGSAPGTSTEPSEGSAPGTSTEPSEGSAPGTSTEPSEGSAPGTSTEPSEGSAPGTSTEPSEGSAPGSPAGSPTSTEEGTSTEPSEGSAPGTSESATPESGPGSEPATSGSETPGTSESATPESGPGSEPATSGSETPGTSESATPESGPGTSTEPSEGSAPGTSESATPESGPGSPAGSPTSTEEGSPAGSPTSTEEGSPAGSPTSTEEGTSESATPESGPGTSTEPSEGSAPGTSESATPESGPGSEPATSGSETPGTSESATPESGPGSEPATSGSETPGTSESATPESGPGTSTEPSEGSAPGSPAGSPTSTEEGTSESATPESGPGSEPATSGSETPGTSESATPESGPGSPAGSPTSTEEGSPAGSPTSTEEGTSTEPSEGSAPGTSESATPESGPGTSESATPESGPGTSESATPESGPGSEPATSGSETPGSEPATSGSETPGSPAGSPTSTEEGTSTEPSEGSAPGTSTEPSEGSAPGSEPATSGSETPGTSESATPESGPGTSTEPSEGSAPGFPTIPLSRLFDNAMLRAHRLHQLAFDTYQEFEEAYIPKEQKYSFLQNPQTSLCFSESIPTPSNREETQQKSNLELLRISLLLIQSWLEPVQFLRSVFANSLVYGASDSNVYDLLKDLEEGIQTLMGRLEDGSPRTGQIFKQTYSKFDTNSHNDDALLKNYGLLYCFRKDMDKVETFLRIVQCRSVEGSCGFGAPLGLRLRGGGGTSESATPESGPGSEPATSGSETPGTSESATPESGPGSEPATSGSETPGTSESATPESGPGTSTEPSEGSAPGSPAGSPTSTEEGTSESATPESGPGSEPATSGSETPGTSESATPESGPGSPAGSPTSTEEGSPAGSPTSTEEGTSTEPSEGSAPGTSESATPESGPGTSESATPESGPGTSESATPESGPGSEPATSGSETPGSEPATSGSETPGSPAGSPTSTEEGTSTEPSEGSAPGTSTEPSEGSAPGSEPATSGSETPGTSESATPESGPGTSTEPSEGSAP

SEQ ID NO: 812 - DNA, 4218 bp, Artificial Sequence
  Description of Artificial Sequence: Synthetic polynucleotide
atggctgaacctgctggctctccaacctccactgaggaaggtaccccgggtagcggtactgcttcttcctctccaggtagctctaccccttctggtgcaaccggctctccaggtgcttctccgggcaccagctctaccggttctccaggtagcccggctggctctcctacctctactgaggaaggtacttctgaaagcgctactcctgagtctggtccaggtacctctactgaaccgtccgaaggtagcgctccaggtagcccagcaggctctccgacttccactgaggaaggtacttctactgaaccttccgaaggcagcgcaccaggtacctctactgaaccttctgagggcagcgctccaggtacttctgaaagcgctaccccggaatctggcccaggtagcgaaccggctacttctggttctgaaaccccaggtagcgaaccggctacctccggttctgaaactccaggtagcccggcaggctctccgacctctactgaggaaggtacttctgaaagcgcaaccccggagtccggcccaggtacctctaccgaaccgtctgagggcagcgcaccaggtacttctaccgaaccgtccgagggtagcgcaccaggtagcccagcaggttctcctacctccaccgaggaaggtacttctaccgaaccgtccgagggtagcgcaccaggtacctctactgaaccttctgagggcagcgctccaggtacttctgaaagcgctaccccggagtccggtccaggtacttctactgaaccgtccgaaggtagcgcaccaggtacttctgaaagcgcaacccctgaatccggtccaggtagcgaaccggctacttctggctctgagactccaggtacttctaccgaaccgtccgaaggtagcgcaccaggtacttctactgaaccgtctgaaggtagcgcaccaggtacttctgaaagcgcaaccccggaatccggcccaggtacctctgaaagcgcaaccccggagtccggcccaggtagccctgctggctctccaacctccaccgaagaaggtacctctgaaagcgcaacccctgaatccggcccaggtagcgaaccggcaacctccggttctgaaaccccaggtacctctgaaagcgctactccggagtctggcccaggtacctctactgaaccgtctgagggtagcgctccaggtacttctactgaaccgtccgaaggtagcgcaccaggtacttctaccgaaccgtccgaaggcagcgctccaggtacctctactgaaccttccgagggcagcgctccaggtacctctaccgaaccttctgaaggtagcgcaccaggtacttctaccgaaccgtccgagggtagcgcaccaggtagcccagcaggttctcctacctccaccgaggaaggtacttctaccgaaccgtccgagggtagcgcaccaggtacctctgaaagcgcaactcctgagtctggcccaggtagcgaacctgctacctccggctctgagactccaggtacctctgaaagcgcaaccccggaatctggtccaggtagcgaacctgcaacctctggctctgaaaccccaggtacctctgaaagcgctactcctgaatctggcccaggtacttctactgaaccgtccgagggcagcgcaccaggtacttctgaaagcgctactcctgagtccggcccaggtagcccggctggctctccgacttccaccgaggaaggtagcccggctggctctccaacttctactgaagaaggtagcccggcaggctctccgacctctactgaggaaggtacttctgaaagcgcaaccccggagtccggcccaggtacctctaccgaaccgtctgagggcagcgcaccaggtacctctgaaagcgcaactcctgagtctggcccaggtagcgaacctgctacctccggctctgagactccaggtacctctgaaagcgcaaccccggaatctggtccaggtagcgaacctgcaacctctggctctgaaaccccaggtacctctgaaagcgctactcctgaatctggcccaggtacttctactgaaccgtccgagggcagcgcaccaggtagccctgctggctctccaacctccaccgaagaaggtacctctgaaagcgcaacccctgaatccggcccaggtagcgaaccggcaacctccggttctgaaaccccaggtacttctgaaagcgctactcctgagtccggcccaggtagcccggctggctctccgacttccaccgaggaaggtagcccggctggctctccaacttctactgaagaaggtacttctaccgaaccttccgagggcagcgcaccaggtacttctgaaagcgctacccctgagtccggcccaggtacttctgaaagcgctactcctgaatccggtccaggtacttctgaaagcgctaccccggaatctggcccaggtagcgaaccggctacttctggttctgaaaccccaggtagcgaaccggctacctccggttctgaaactccaggtagcccagcaggctctccgacttccactgaggaaggtacttctactgaaccttccgaaggcagcgcaccaggtacctctactgaaccttctgagggcagcgctccaggtagcgaacctgcaacctctggctctgaaaccccaggtacctctgaaagcgctactcctgaatctggcccaggtacttctactgaaccgtccgagggcagcgcaccaggttttccgactattccgctgtctcgtctgtttgataatgctatgctgcgtgcgcaccgtctgcaccagctggcctttgatacttaccaggaatttgaagaagcctacattcctaaagagcagaagtactctttcctgcaaaacccacagacttctctctgcttcagcgaatctattccgacgccttccaatcgcgaggaaactcagcaaaagtccaatctggaactactccgcatttctctgcttctgattcagagctggctagaaccagtgcaatttctgcgttccgtcttcgccaatagcctagtttatggcgcatccgacagcaacgtatacgatctcctgaaagatctcgaggaaggcattcagaccctgatgggtcgtctcgaggatggctctccgcgtactggtcagatcttcaagcagacttactctaaatttgatactaacagccacaatgacgatgcgcttctaaaaaactatggtctgctgtattgttttcgtaaagatatggacaaagttgaaaccttcctgcgtattgttcagtgtcgttccgttgagggcagctgtggtttctaaggtgcgccgctgggcctgcgcctgcgcggcggcggtggtacctctgaaagcgcaactcctgagtctggcccaggtagcgaacctgctacctccggctctgagactccaggtacctctgaaagcgcaaccccggaatctggtccaggtagcgaacctgcaacctctggctctgaaaccccaggtacctctgaaagcgctactcctgaatctggcccaggtacttctactgaaccgtccgagggcagcgcaccaggtagccctgctggctctccaacctccaccgaagaaggtacctctgaaagcgcaacccctgaatccggcccaggtagcgaaccggcaacctccggttctgaaaccccaggtacttctgaaagcgctactcctgagtccggcccaggtagcccggctggctctccgacttccaccgaggaaggtagcccggctggctctccaacttctactgaagaaggtacttctaccgaaccttccgagggcagcgcaccaggtacttctgaaagcgctacccctgagtccggcccaggtacttctgaaagcgctactcctgaatccggtccaggtacttctgaaagcgctaccccggaatctggcccaggtagcgaaccggctacttctggttctgaaaccccaggtagcgaaccggctacctccggttctgaaactccaggtagcccagcaggctctccgacttccactgaggaaggtacttctactgaaccttccgaaggcagcgcaccaggtacctctactgaaccttctgagggcagcgctccaggtagcgaacctgcaacctctggctctgaaaccccaggtacctctgaaagcgctactcctgaatctggcccaggtacttctactgaaccgtccgagggcagcgcacca

SEQ ID NO: 813 - protein, 1272 aa, Artificial Sequence
  Description of Artificial Sequence: Synthetic polypeptide
MAEPAGSPTSTEEGASPGTSSTGSPGSSTPSGATGSPGSSTPSGATGSPGTSTEPSEGSAPGSEPATSGSETPGSPAGSPTSTEEGSTSSTAESPGPGTSTPESGSASPGSTSESPSGTAPGSTSESPSGTAPGTSTPESGSASPGTSTPESGSASPGSEPATSGSETPGTSESATPESGPGSPAGSPTSTEEGTSTEPSEGSAPGTSESATPESGPGTSTEPSEGSAPGTSTEPSEGSAPGSPAGSPTSTEEGTSTEPSEGSAPGTSTEPSEGSAPGTSESATPESGPGTSESATPESGPGTSTEPSEGSAPGTSTEPSEGSAPGTSESATPESGPGTSTEPSEGSAPGSEPATSGSETPGSPAGSPTSTEEGSSTPSGATGSPGTPGSGTASSSPGSSTPSGATGSPGTSTEPSEGSAPGTSTEPSEGSAPGSEPATSGSETPGSPAGSPTSTEEGSPAGSPTSTEEGTSTEPSEGSAPGASASGAPSTGGTSESATPESGPGSPAGSPTSTEEGSPAGSPTSTEEGSTSSTAESPGPGSTSESPSGTAPGTSPSGESSTAPGTPGSGTASSSPGSSTPSGATGSPGSSPSASTGTGPGSEPATSGSETPGTSESATPESGPGSEPATSGSETPGSTSSTAESPGPGSTSSTAESPGPGTSPSGESSTAPGSEPATSGSETPGSEPATSGSETPGTSTEPSEGSAPGSTSSTAESPGPGTSTPESGSASPGSTSESPSGTAPGTSTEPSEGSAPGTSTEPSEGSAPGTSTEPSEGSAPGSSTPSGATGSPGSSPSASTGTGPGASPGTSSTGSPGSEPATSGSETPGTSESATPESGPGSPAGSPTSTEEGSSTPSGATGSPGSSPSASTGTGPGASPGTSSTGSPGTSESATPESGPGTSTEPSEGSAPGTSTEPSEGSAPGFPTIPLSRLFDNAMLRAHRLHQLAFDTYQEFEEAYIPKEQKYSFLQNPQTSLCFSESIPTPSNREETQQKSNLELLRISLLLIQSWLEPVQFLRSVFANSLVYGASDSNVYDLLKDLEEGIQTLMGRLEDGSPRTGQIFKQTYSKFDTNSHNDDALLKNYGLLYCFRKDMDKVETFLRIVQCRSVEGSCGFGLTPRSLLVGGGGSEPATSGSETPGTSESATPESGPGSEPATSGSETPGSPAGSPTSTEEGTSTEPSEGSAPGSEPATSGSETPGSEPATSGSETPGSEPATSGSETPGTSTEPSEGSAPGTSESATPESGPGSEPATSGSETPGTSTEPSEGSAP

SEQ ID NO: 814 - DNA, 3819 bp, Artificial Sequence
  Description of Artificial Sequence: Synthetic polynucleotide
atggctgaacctgctggctctccaacctccactgaggaaggtgcatccccgggcaccagctctaccggttctccaggtagctctaccccgtctggtgctaccggctctccaggtagctctaccccgtctggtgctactggctctccaggtacttctactgaaccgtctgaaggcagcgcaccaggtagcgaaccggctacttccggttctgaaaccccaggtagcccagcaggttctccaacttctactgaagaaggttctaccagctctaccgcagaatctcctggtccaggtacctctactccggaaagcggctctgcatctccaggttctactagcgaatctccttctggcactgcaccaggttctactagcgaatccccgtctggtactgctccaggtacttctactcctgaaagcggttccgcttctccaggtacctctactccggaaagcggttctgcatctccaggtagcgaaccggcaacctccggctctgaaaccccaggtacctctgaaagcgctactcctgaatccggcccaggtagcccggcaggttctccgacttccactgaggaaggtacctctactgaaccttctgagggcagcgctccaggtacttctgaaagcgctaccccggagtccggtccaggtacttctactgaaccgtccgaaggtagcgcaccaggtacttctaccgaaccgtccgagggtagcgcaccaggtagcccagcaggttctcctacctccaccgaggaaggtacttctaccgaaccgtccgagggtagcgcaccaggtacttctaccgaaccttccgagggcagcgcaccaggtacttctgaaagcgctacccctgagtccggcccaggtacttctgaaagcgctactcctgaatccggtccaggtacctctactgaaccttccgaaggcagcgctccaggtacctctaccgaaccgtccgagggcagcgcaccaggtacttctgaaagcgcaacccctgaatccggtccaggtacttctactgaaccttccgaaggtagcgctccaggtagcgaacctgctacttctggttctgaaaccccaggtagcccggctggctctccgacctccaccgaggaaggtagctctaccccgtctggtgctactggttctccaggtactccgggcagcggtactgcttcttcctctccaggtagctctaccccttctggtgctactggctctccaggtacctctaccgaaccgtccgagggtagcgcaccaggtacctctactgaaccgtctgagggtagcgctccaggtagcgaaccggcaacctccggttctgaaactccaggtagccctgctggctctccgacttctactgaggaaggtagcccggctggttctccgacttctactgaggaaggtacttctaccgaaccttccgaaggtagcgctccaggtgcaagcgcaagcggcgcgccaagcacgggaggtacttctgaaagcgctactcctgagtccggcccaggtagcccggctggctctccgacttccaccgaggaaggtagcccggctggctctccaacttctactgaagaaggttctaccagctctaccgctgaatctcctggcccaggttctactagcgaatctccgtctggcaccgcaccaggtacttcccctagcggtgaatcttctactgcaccaggtacccctggcagcggtaccgcttcttcctctccaggtagctctaccccgtctggtgctactggctctccaggttctagcccgtctgcatctaccggtaccggcccaggtagcgaaccggcaacctccggctctgaaactccaggtacttctgaaagcgctactccggaatccggcccaggtagcgaaccggctacttccggctctgaaaccccaggttccaccagctctactgcagaatctccgggcccaggttctactagctctactgcagaatctccgggtccaggtacttctcctagcggcgaatcttctaccgctccaggtagcgaaccggcaacctctggctctgaaactccaggtagcgaacctgcaacctccggctctgaaaccccaggtacttctactgaaccttctgagggcagcgcaccaggttctaccagctctaccgcagaatctcctggtccaggtacctctactccggaaagcggctctgcatctccaggttctactagcgaatctccttctggcactgcaccaggtacttctaccgaaccgtccgaaggcagcgctccaggtacctctactgaaccttccgagggcagcgctccaggtacctctaccgaaccttctgaaggtagcgcaccaggtagctctactccgtctggtgcaaccggctccccaggttctagcccgtctgcttccactggtactggcccaggtgcttccccgggcaccagctctactggttctccaggtagcgaacctgctacctccggttctgaaaccccaggtacctctgaaagcgcaactccggagtctggtccaggtagccctgcaggttctcctacctccactgaggaaggtagctctactccgtctggtgcaaccggctccccaggttctagcccgtctgcttccactggtactggcccaggtgcttccccgggcaccagctctactggttctccaggtacctctgaaagcgctactccggagtctggcccaggtacctctactgaaccgtctgagggtagcgctccaggtacttctactgaaccgtccgaaggtagcgcaccaggttttccgactattccgctgtctcgtctgtttgataatgctatgctgcgtgcgcaccgtctgcaccagctggcctttgatacttaccaggaatttgaagaagcctacattcctaaagagcagaagtactctttcctgcaaaacccacagacttctctctgcttcagcgaatctattccgacgccttccaatcgcgaggaaactcagcaaaagtccaatctggaactactccgcatttctctgcttctgattcagagctggctagaaccagtgcaatttctgcgttccgtcttcgccaatagcctagtttatggcgcatccgacagcaacgtatacgatctcctgaaagatctcgaggaaggcattcagaccctgatgggtcgtctcgaggatggctctccgcgtactggtcagatcttcaagcagacttactctaaatttgatactaacagccacaatgacgatgcgcttctaaaaaactatggtctgctgtattgttttcgtaaagatatggacaaagttgaaaccttcctgcgtattgttcagtgtcgttccgttgagggcagctgtggtttctaaggtctgaccccgcgcagcctgctggtgggcggcggtggtagcgaaccggcaacttccggctctgaaaccccaggtacttctgaaagcgctactcctgagtctggcccaggtagcgaacctgctacctctggctctgaaaccccaggtagcccggcaggctctccgacttccaccgaggaaggtacctctactgaaccttctgagggtagcgctccaggtagcgaaccggcaacctctggctctgaaaccccaggtagcgaacctgctacctccggctctgaaactccaggtagcgaaccggctacttccggttctgaaactccaggtacctctaccgaaccttccgaaggcagcgcaccaggtacttctgaaagcgcaacccctgaatccggtccaggtagcgaaccggctacttctggctctgagactccaggtacttctaccgaaccgtccgaaggtagcgcacca

SEQ ID NO: 815 - protein, 1272 aa, Artificial Sequence
  Description of Artificial Sequence: Synthetic polypeptide
MAEPAGSPTSTEEGASPGTSSTGSPGSSTPSGATGSPGSSTPSGATGSPGTSTEPSEGSAPGSEPATSGSETPGSPAGSPTSTEEGSTSSTAESPGPGTSTPESGSASPGSTSESPSGTAPGSTSESPSGTAPGTSTPESGSASPGTSTPESGSASPGSEPATSGSETPGTSESATPESGPGSPAGSPTSTEEGTSTEPSEGSAPGTSESATPESGPGTSTEPSEGSAPGTSTEPSEGSAPGSPAGSPTSTEEGTSTEPSEGSAPGTSTEPSEGSAPGTSESATPESGPGTSESATPESGPGTSTEPSEGSAPGTSTEPSEGSAPGTSESATPESGPGTSTEPSEGSAPGSEPATSGSETPGSPAGSPTSTEEGSSTPSGATGSPGTPGSGTASSSPGSSTPSGATGSPGTSTEPSEGSAPGTSTEPSEGSAPGSEPATSGSETPGSPAGSPTSTEEGSPAGSPTSTEEGTSTEPSEGSAPGASASGAPSTGGTSESATPESGPGSPAGSPTSTEEGSPAGSPTSTEEGSTSSTAESPGPGSTSESPSGTAPGTSPSGESSTAPGTPGSGTASSSPGSSTPSGATGSPGSSPSASTGTGPGSEPATSGSETPGTSESATPESGPGSEPATSGSETPGSTSSTAESPGPGSTSSTAESPGPGTSPSGESSTAPGSEPATSGSETPGSEPATSGSETPGTSTEPSEGSAPGSTSSTAESPGPGTSTPESGSASPGSTSESPSGTAPGTSTEPSEGSAPGTSTEPSEGSAPGTSTEPSEGSAPGSSTPSGATGSPGSSPSASTGTGPGASPGTSSTGSPGSEPATSGSETPGTSESATPESGPGSPAGSPTSTEEGSSTPSGATGSPGSSPSASTGTGPGASPGTSSTGSPGTSESATPESGPGTSTEPSEGSAPGTSTEPSEGSAPGFPTIPLSRLFDNAMLRAHRLHQLAFDTYQEFEEAYIPKEQKYSFLQNPQTSLCFSESIPTPSNREETQQKSNLELLRISLLLIQSWLEPVQFLRSVFANSLVYGASDSNVYDLLKDLEEGIQTLMGRLEDGSPRTGQIFKQTYSKFDTNSHNDDALLKNYGLLYCFRKDMDKVETFLRIVQCRSVEGSCGFGGGKLTRVVGGGGSEPATSGSETPGTSESATPESGPGSEPATSGSETPGSPAGSPTSTEEGTSTEPSEGSAPGSEPATSGSETPGSEPATSGSETPGSEPATSGSETPGTSTEPSEGSAPGTSESATPESGPGSEPATSGSETPGTSTEPSEGSAP

SEQ ID NO: 816 - DNA, 3819 bp, Artificial Sequence
  Description of Artificial Sequence: Synthetic polynucleotide
atggctgaacctgctggctctccaacctccactgaggaaggtgcatccccgggcaccagctctaccggttctccaggtagctctaccccgtctggtgctaccggctctccaggtagctctaccccgtctggtgctactggctctccaggtacttctactgaaccgtctgaaggcagcgcaccaggtagcgaaccggctacttccggttctgaaaccccaggtagcccagcaggttctccaacttctactgaagaaggttctaccagctctaccgcagaatctcctggtccaggtacctctactccggaaagcggctctgcatctccaggttctactagcgaatctccttctggcactgcaccaggttctactagcgaatccccgtctggtactgctccaggtacttctactcctgaaagcggttccgcttctccaggtacctctactccggaaagcggttctgcatctccaggtagcgaaccggcaacctccggctctgaaaccccaggtacctctgaaagcgctactcctgaatccggcccaggtagcccggcaggttctccgacttccactgaggaaggtacctctactgaaccttctgagggcagcgctccaggtacttctgaaagcgctaccccggagtccggtccaggtacttctactgaaccgtccgaaggtagcgcaccaggtacttctaccgaaccgtccgagggtagcgcaccaggtagcccagcaggttctcctacctccaccgaggaaggtacttctaccgaaccgtccgagggtagcgcaccaggtacttctaccgaaccttccgagggcagcgcaccaggtacttctgaaagcgctacccctgagtccggcccaggtacttctgaaagcgctactcctgaatccggtccaggtacctctactgaaccttccgaaggcagcgctccaggtacctctaccgaaccgtccgagggcagcgcaccaggtacttctgaaagcgcaacccctgaatccggtccaggtacttctactgaaccttccgaaggtagcgctccaggtagcgaacctgctacttctggttctgaaaccccaggtagcccggctggctctccgacctccaccgaggaaggtagctctaccccgtctggtgctactggttctccaggtactccgggcagcggtactgcttcttcctctccaggtagctctaccccttctggtgctactggctctccaggtacctctaccgaaccgtccgagggtagcgcaccaggtacctctactgaaccgtctgagggtagcgctccaggtagcgaaccggcaacctccggttctgaaactccaggtagccctgctggctctccgacttctactgaggaaggtagcccggctggttctccgacttctactgaggaaggtacttctaccgaaccttccgaaggtagcgctccaggtgcaagcgcaagcggcgcgccaagcacgggaggtacttctgaaagcgctactcctgagtccggcccaggtagcccggctggctctccgacttccaccgaggaaggtagcccggctggctctccaacttctactgaagaaggttctaccagctctaccgctgaatctcctggcccaggttctactagcgaatctccgtctggcaccgcaccaggtacttcccctagcggtgaatcttctactgcaccaggtacccctggcagcggtaccgcttcttcctctccaggtagctctaccccgtctggtgctactggctctccaggttctagcccgtctgcatctaccggtaccggcccaggtagcgaaccggcaacctccggctctgaaactccaggtacttctgaaagcgctactccggaatccggcccaggtagcgaaccggctacttccggctctgaaaccccaggttccaccagctctactgcagaatctccgggcccaggttctactagctctactgcagaatctccgggtccaggtacttctcctagcggcgaatcttctaccgctccaggtagcgaaccggcaacctctggctctgaaactccaggtagcgaacctgcaacctccggctctgaaaccccaggtacttctactgaaccttctgagggcagcgcaccaggttctaccagctctaccgcagaatctcctggtccaggtacctctactccggaaagcggctctgcatctccaggttctactagcgaatctccttctggcactgcaccaggtacttctaccgaaccgtccgaaggcagcgctccaggtacctctactgaaccttccgagggcagcgctccaggtacctctaccgaaccttctgaaggtagcgcaccaggtagctctactccgtctggtgcaaccggctccccaggttctagcccgtctgcttccactggtactggcccaggtgcttccccgggcaccagctctactggttctccaggtagcgaacctgctacctccggttctgaaaccccaggtacctctgaaagcgcaactccggagtctggtccaggtagccctgcaggttctcctacctccactgaggaaggtagctctactccgtctggtgcaaccggctccccaggttctagcccgtctgcttccactggtactggcccaggtgcttccccgggcaccagctctactggttctccaggtacctctgaaagcgctactccggagtctggcccaggtacctctactgaaccgtctgagggtagcgctccaggtacttctactgaaccgtccgaaggtagcgcaccaggttttccgactattccgctgtctcgtctgtttgataatgctatgctgcgtgcgcaccgtctgcaccagctggcctttgatacttaccaggaatttgaagaagcctacattcctaaagagcagaagtactctttcctgcaaaacccacagacttctctctgcttcagcgaatctattccgacgccttccaatcgcgaggaaactcagcaaaagtccaatctggaactactccgcatttctctgcttctgattcagagctggctagaaccagtgcaatttctgcgttccgtcttcgccaatagcctagtttatggcgcatccgacagcaacgtatacgatctcctgaaagatctcgaggaaggcattcagaccctgatgggtcgtctcgaggatggctctccgcgtactggtcagatcttcaagcagacttactctaaatttgatactaacagccacaatgacgatgcgcttctaaaaaactatggtctgctgtattgttttcgtaaagatatggacaaagttgaaaccttcctgcgtattgttcagtgtcgttccgttgagggcagctgtggtttctaaggtggcggcaaactgacccgcgtggtgggcggcggtggtagcgaaccggcaacttccggctctgaaaccccaggtacttctgaaagcgctactcctgagtctggcccaggtagcgaacctgctacctctggctctgaaaccccaggtagcccggcaggctctccgacttccaccgaggaaggtacctctactgaaccttctgagggtagcgctccaggtagcgaaccggcaacctctggctctgaaaccccaggtagcgaacctgctacctccggctctgaaactccaggtagcgaaccggctacttccggttctgaaactccaggtacctctaccgaaccttccgaaggcagcgcaccaggtacttctgaaagcgcaacccctgaatccggtccaggtagcgaaccggctacttctggctctgagactccaggtacttctaccgaaccgtccgaaggtagcgcacca

SEQ ID NO: 817 - protein, 1272 aa, Artificial Sequence
  Description of Artificial Sequence: Synthetic polypeptide
MAEPAGSPTSTEEGASPGTSSTGSPGSSTPSGATGSPGSSTPSGATGSPGTSTEPSEGSAPGSEPATSGSETPGSPAGSPTSTEEGSTSSTAESPGPGTSTPESGSASPGSTSESPSGTAPGSTSESPSGTAPGTSTPESGSASPGTSTPESGSASPGSEPATSGSETPGTSESATPESGPGSPAGSPTSTEEGTSTEPSEGSAPGTSESATPESGPGTSTEPSEGSAPGTSTEPSEGSAPGSPAGSPTSTEEGTSTEPSEGSAPGTSTEPSEGSAPGTSESATPESGPGTSESATPESGPGTSTEPSEGSAPGTSTEPSEGSAPGTSESATPESGPGTSTEPSEGSAPGSEPATSGSETPGSPAGSPTSTEEGSSTPSGATGSPGTPGSGTASSSPGSSTPSGATGSPGTSTEPSEGSAPGTSTEPSEGSAPGSEPATSGSETPGSPAGSPTSTEEGSPAGSPTSTEEGTSTEPSEGSAPGASASGAPSTGGTSESATPESGPGSPAGSPTSTEEGSPAGSPTSTEEGSTSSTAESPGPGSTSESPSGTAPGTSPSGESSTAPGTPGSGTASSSPGSSTPSGATGSPGSSPSASTGTGPGSEPATSGSETPGTSESATPESGPGSEPATSGSETPGSTSSTAESPGPGSTSSTAESPGPGTSPSGESSTAPGSEPATSGSETPGSEPATSGSETPGTSTEPSEGSAPGSTSSTAESPGPGTSTPESGSASPGSTSESPSGTAPGTSTEPSEGSAPGTSTEPSEGSAPGTSTEPSEGSAPGSSTPSGATGSPGSSPSASTGTGPGASPGTSSTGSPGSEPATSGSETPGTSESATPESGPGSPAGSPTSTEEGSSTPSGATGSPGSSPSASTGTGPGASPGTSSTGSPGTSESATPESGPGTSTEPSEGSAPGTSTEPSEGSAPGFPTIPLSRLFDNAMLRAHRLHQLAFDTYQEFEEAYIPKEQKYSFLQNPQTSLCFSESIPTPSNREETQQKSNLELLRISLLLIQSWLEPVQFLRSVFANSLVYGASDSNVYDLLKDLEEGIQTLMGRLEDGSPRTGQIFKQTYSKFDTNSHNDDALLKNYGLLYCFRKDMDKVETFLRIVQCRSVEGSCGFGGGLGPVSGVPGGSEPATSGSETPGTSESATPESGPGSEPATSGSETPGSPAGSPTSTEEGTSTEPSEGSAPGSEPATSGSETPGSEPATSGSETPGSEPATSGSETPGTSTEPSEGSAPGTSESATPESGPGSEPATSGSETPGTSTEPSEGSAP

SEQ ID NO: 818 - DNA, 3819 bp, Artificial Sequence
  Description of Artificial Sequence: Synthetic polynucleotide
atggctgaacctgctggctctccaacctccactgaggaaggtgcatccccgggcaccagctctaccggttctccaggtagctctaccccgtctggtgctaccggctctccaggtagctctaccccgtctggtgctactggctctccaggtacttctactgaaccgtctgaaggcagcgcaccaggtagcgaaccggctacttccggttctgaaaccccaggtagcccagcaggttctccaacttctactgaagaaggttctaccagctctaccgcagaatctcctggtccaggtacctctactccggaaagcggctctgcatctccaggttctactagcgaatctccttctggcactgcaccaggttctactagcgaatccccgtctggtactgctccaggtacttctactcctgaaagcggttccgcttctccaggtacctctactccggaaagcggttctgcatctccaggtagcgaaccggcaacctccggctctgaaaccccaggtacctctgaaagcgctactcctgaatccggcccaggtagcccggcaggttctccgacttccactgaggaaggtacctctactgaaccttctgagggcagcgctccaggtacttctgaaagcgctaccccggagtccggtccaggtacttctactgaaccgtccgaaggtagcgcaccaggtacttctaccgaaccgtccgagggtagcgcaccaggtagcccagcaggttctcctacctccaccgaggaaggtacttctaccgaaccgtccgagggtagcgcaccaggtacttctaccgaaccttccgagggcagcgcaccaggtacttctgaaagcgctacccctgagtccggcccaggtacttctgaaagcgctactcctgaatccggtccaggtacctctactgaaccttccgaaggcagcgctccaggtacctctaccgaaccgtccgagggcagcgcaccaggtacttctgaaagcgcaacccctgaatccggtccaggtacttctactgaaccttccgaaggtagcgctccaggtagcgaacctgctacttctggttctgaaaccccaggtagcccggctggctctccgacctccaccgaggaaggtagctctaccccgtctggtgctactggttctccaggtactccgggcagcggtactgcttcttcctctccaggtagctctaccccttctggtgctactggctctccaggtacctctaccgaaccgtccgagggtagcgcaccaggtacctctactgaaccgtctgagggtagcgctccaggtagcgaaccggcaacctccggttctgaaactccaggtagccctgctggctctccgacttctactgaggaaggtagcccggctggttctccgacttctactgaggaaggtacttctaccgaaccttccgaaggtagcgctccaggtgcaagcgcaagcggcgcgccaagcacgggaggtacttctgaaagcgctactcctgagtccggcccaggtagcccggctggctctccgacttccaccgaggaaggtagcccggctggctctccaacttctactgaagaaggttctaccagctctaccgctgaatctcctggcccaggttctactagcgaatctccgtctggcaccgcaccaggtacttcccctagcggtgaatcttctactgcaccaggtacccctggcagcggtaccgcttcttcctctccaggtagctctaccccgtctggtgctactggctctccaggttctagcccgtctgcatctaccggtaccggcccaggtagcgaaccggcaacctccggctctgaaactccaggtacttctgaaagcgctactccggaatccggcccaggtagcgaaccggctacttccggctctgaaaccccaggttccaccagctctactgcagaatctccgggcccaggttctactagctctactgcagaatctccgggtccaggtacttctcctagcggcgaatcttctaccgctccaggtagcgaaccggcaacctctggctctgaaactccaggtagcgaacctgcaacctccggctctgaaaccccaggtacttctactgaaccttctgagggcagcgcaccaggttctaccagctctaccgcagaatctcctggtccaggtacctctactccggaaagcggctctgcatctccaggttctactagcgaatctccttctggcactgcaccaggtacttctaccgaaccgtccgaaggcagcgctccaggtacctctactgaaccttccgagggcagcgctccaggtacctctaccgaaccttctgaaggtagcgcaccaggtagctctactccgtctggtgcaaccggctccccaggttctagcccgtctgcttccactggtactggcccaggtgcttccccgggcaccagctctactggttctccaggtagcgaacctgctacctccggttctgaaaccccaggtacctctgaaagcgcaactccggagtctggtccaggtagccctgcaggttctcctacctccactgaggaaggtagctctactccgtctggtgcaaccggctccccaggttctagcccgtctgcttccactggtactggcccaggtgcttccccgggcaccagctctactggttctccaggtacctctgaaagcgctactccggagtctggcccaggtacctctactgaaccgtctgagggtagcgctccaggtacttctactgaaccgtccgaaggtagcgcaccaggttttccgactattccgctgtctcgtctgtttgataatgctatgctgcgtgcgcaccgtctgcaccagctggcctttgatacttaccaggaatttgaagaagcctacattcctaaagagcagaagtactctttcctgcaaaacccacagacttctctctgcttcagcgaatctattccgacgccttccaatcgcgaggaaactcagcaaaagtccaatctggaactactccgcatttctctgcttctgattcagagctggctagaaccagtgcaatttctgcgttccgtcttcgccaatagcctagtttatggcgcatccgacagcaacgtatacgatctcctgaaagatctcgaggaaggcattcagaccctgatgggtcgtctcgaggatggctctccgcgtactggtcagatcttcaagcagacttactctaaatttgatactaacagccacaatgacgatgcgcttctaaaaaactatggtctgctgtattgttttcgtaaagatatggacaaagttgaaaccttcctgcgtattgttcagtgtcgttccgttgagggcagctgtggtttctaaggtggcggcctgggcccggtgagcggcgtgccgggtggtagcgaaccggcaacttccggctctgaaaccccaggtacttctgaaagcgctactcctgagtctggcccaggtagcgaacctgctacctctggctctgaaaccccaggtagcccggcaggctctccgacttccaccgaggaaggtacctctactgaaccttctgagggtagcgctccaggtagcgaaccggcaacctctggctctgaaaccccaggtagcgaacctgctacctccggctctgaaactccaggtagcgaaccggctacttccggttctgaaactccaggtacctctaccgaaccttccgaaggcagcgcaccaggtacttctgaaagcgcaacccctgaatccggtccaggtagcgaaccggctacttctggctctgagactccaggtacttctaccgaaccgtccgaaggtagcgcacca

SEQ ID NO: 819 - protein, 1272 aa, Artificial Sequence
  Description of Artificial Sequence: Synthetic polypeptide
MAEPAGSPTSTEEGASPGTSSTGSPGSSTPSGATGSPGSSTPSGATGSPGTSTEPSEGSAPGSEPATSGSETPGSPAGSPTSTEEGSTSSTAESPGPGTSTPESGSASPGSTSESPSGTAPGSTSESPSGTAPGTSTPESGSASPGTSTPESGSASPGSEPATSGSETPGTSESATPESGPGSPAGSPTSTEEGTSTEPSEGSAPGTSESATPESGPGTSTEPSEGSAPGTSTEPSEGSAPGSPAGSPTSTEEGTSTEPSEGSAPGTSTEPSEGSAPGTSESATPESGPGTSESATPESGPGTSTEPSEGSAPGTSTEPSEGSAPGTSESATPESGPGTSTEPSEGSAPGSEPATSGSETPGSPAGSPTSTEEGSSTPSGATGSPGTPGSGTASSSPGSSTPSGATGSPGTSTEPSEGSAPGTSTEPSEGSAPGSEPATSGSETPGSPAGSPTSTEEGSPAGSPTSTEEGTSTEPSEGSAPGASASGAPSTGGTSESATPESGPGSPAGSPTSTEEGSPAGSPTSTEEGSTSSTAESPGPGSTSESPSGTAPGTSPSGESSTAPGTPGSGTASSSPGSSTPSGATGSPGSSPSASTGTGPGSEPATSGSETPGTSESATPESGPGSEPATSGSETPGSTSSTAESPGPGSTSSTAESPGPGTSPSGESSTAPGSEPATSGSETPGSEPATSGSETPGTSTEPSEGSAPGSTSSTAESPGPGTSTPESGSASPGSTSESPSGTAPGTSTEPSEGSAPGTSTEPSEGSAPGTSTEPSEGSAPGSSTPSGATGSPGSSPSASTGTGPGASPGTSSTGSPGSEPATSGSETPGTSESATPESGPGSPAGSPTSTEEGSSTPSGATGSPGSSPSASTGTGPGASPGTSSTGSPGTSESATPESGPGTSTEPSEGSAPGTSTEPSEGSAPGFPTIPLSRLFDNAMLRAHRLHQLAFDTYQEFEEAYIPKEQKYSFLQNPQTSLCFSESIPTPSNREETQQKSNLELLRISLLLIQSWLEPVQFLRSVFANSLVYGASDSNVYDLLKDLEEGIQTLMGRLEDGSPRTGQIFKQTYSKFDTNSHNDDALLKNYGLLYCFRKDMDKVETFLRIVQCRSVEGSCGFGAPLGLRLRGGGGSEPATSGSETPGTSESATPESGPGSEPATSGSETPGSPAGSPTSTEEGTSTEPSEGSAPGSEPATSGSETPGSEPATSGSETPGSEPATSGSETPGTSTEPSEGSAPGTSESATPESGPGSEPATSGSETPGTSTEPSEGSAP

SEQ ID NO: 820 - DNA, 3819 bp, Artificial Sequence
  Description of Artificial Sequence: Synthetic polynucleotide
atggctgaacctgctggctctccaacctccactgaggaaggtgcatccccgggcaccagctctaccggttctccaggtagctctaccccgtctggtgctaccggctctccaggtagctctaccccgtctggtgctactggctctccaggtacttctactgaaccgtctgaaggcagcgcaccaggtagcgaaccggctacttccggttctgaaaccccaggtagcccagcaggttctccaacttctactgaagaaggttctaccagctctaccgcagaatctcctggtccaggtacctctactccggaaagcggctctgcatctccaggttctactagcgaatctccttctggcactgcaccaggttctactagcgaatccccgtctggtactgctccaggtacttctactcctgaaagcggttccgcttctccaggtacctctactccggaaagcggttctgcatctccaggtagcgaaccggcaacctccggctctgaaaccccaggtacctctgaaagcgctactcctgaatccggcccaggtagcccggcaggttctccgacttccactgaggaaggtacctctactgaaccttctgagggcagcgctccaggtacttctgaaagcgctaccccggagtccggtccaggtacttctactgaaccgtccgaaggtagcgcaccaggtacttctaccgaaccgtccgagggtagcgcaccaggtagcccagcaggttctcctacctccaccgaggaaggtacttctaccgaaccgtccgagggtagcgcaccaggtacttctaccgaaccttccgagggcagcgcaccaggtacttctgaaagcgctacccctgagtccggcccaggtacttctgaaagcgctactcctgaatccggtccaggtacctctactgaaccttccgaaggcagcgctccaggtacctctaccgaaccgtccgagggcagcgcaccaggtacttctgaaagcgcaacccctgaatccggtccaggtacttctactgaaccttccgaaggtagcgctccaggtagcgaacctgctacttctggttctgaaaccccaggtagcccggctggctctccgacctccaccgaggaaggtagctctaccccgtctggtgctactggttctccaggtactccgggcagcggtactgcttcttcctctccaggtagctctaccccttctggtgctactggctctccaggtacctctaccgaaccgtccgagggtagcgcaccaggtacctctactgaaccgtctgagggtagcgctccaggtagcgaaccggcaacctccggttctgaaactccaggtagccctgctggctctccgacttctactgaggaaggtagcccggctggttctccgacttctactgaggaaggtacttctaccgaaccttccgaaggtagcgctccaggtgcaagcgcaagcggcgcgccaagcacgggaggtacttctgaaagcgctactcctgagtccggcccaggtagcccggctggctctccgacttccaccgaggaaggtagcccggctggctctccaacttctactgaagaaggttctaccagctctaccgctgaatctcctggcccaggttctactagcgaatctccgtctggcaccgcaccaggtacttcccctagcggtgaatcttctactgcaccaggtacccctggcagcggtaccgcttcttcctctccaggtagctctaccccgtctggtgctactggctctccaggttctagcccgtctgcatctaccggtaccggcccaggtagcgaaccggcaacctccggctctgaaactccaggtacttctgaaagcgctactccggaatccggcccaggtagcgaaccggctacttccggctctgaaaccccaggttccaccagctctactgcagaatctccgggcccaggttctactagctctactgcagaatctccgggtccaggtacttctcctagcggcgaatcttctaccgctccaggtagcgaaccggcaacctctggctctgaaactccaggtagcgaacctgcaacctccggctctgaaaccccaggtacttctactgaaccttctgagggcagcgcaccaggttctaccagctctaccgcagaatctcctggtccaggtacctctactccggaaagcggctctgcatctccaggttctactagcgaatctccttctggcactgcaccaggtacttctaccgaaccgtccgaaggcagcgctccaggtacctctactgaaccttccgagggcagcgctccaggtacctctaccgaaccttctgaaggtagcgcaccaggtagctctactccgtctggtgcaaccggctccccaggttctagcccgtctgcttccactggtactggcccaggtgcttccccgggcaccagctctactggttctccaggtagcgaacctgctacctccggttctgaaaccccaggtacctctgaaagcgcaactccggagtctggtccaggtagccctgcaggttctcctacctccactgaggaaggtagctctactccgtctggtgcaaccggctccccaggttctagcccgtctgcttccactggtactggcccaggtgcttccccgggcaccagctctactggttctccaggtacctctgaaagcgctactccggagtctggcccaggtacctctactgaaccgtctgagggtagcgctccaggtacttctactgaaccgtccgaaggtagcgcaccaggttttccgactattccgctgtctcgtctgtttgataatgctatgctgcgtgcgcaccgtctgcaccagctggcctttgatacttaccaggaatttgaagaagcctacattcctaaagagcagaagtactctttcctgcaaaacccacagacttctctctgcttcagcgaatctattccgacgccttccaatcgcgaggaaactcagcaaaagtccaatctggaactactccgcatttctctgcttctgattcagagctggctagaaccagtgcaatttctgcgttccgtcttcgccaatagcctagtttatggcgcatccgacagcaacgtatacgatctcctgaaagatctcgaggaaggcattcagaccctgatgggtcgtctcgaggatggctctccgcgtactggtcagatcttcaagcagacttactctaaatttgatactaacagccacaatgacgatgcgcttctaaaaaactatggtctgctgtattgttttcgtaaagatatggacaaagttgaaaccttcctgcgtattgttcagtgtcgttccgttgagggcagctgtggtttctaaggtgcgccgctgggcctgcgcctgcgcggcggcggtggtagcgaaccggcaacttccggctctgaaaccccaggtacttctgaaagcgctactcctgagtctggcccaggtagcgaacctgctacctctggctctgaaaccccaggtagcccggcaggctctccgacttccaccgaggaaggtacctctactgaaccttctgagggtagcgctccaggtagcgaaccggcaacctctggctctgaaaccccaggtagcgaacctgctacctccggctctgaaactccaggtagcgaaccggctacttccggttctgaaactccaggtacctctaccgaaccttccgaaggcagcgcaccaggtacttctgaaagcgcaacccctgaatccggtccaggtagcgaaccggctacttctggctctgagactccaggtacttctaccgaaccgtccgaaggtagcgcacca

SEQ ID NO: 821 - protein, 1416 aa, Artificial Sequence
  Description of Artificial Sequence: Synthetic polypeptide
MAEPAGSPTSTEEGASPGTSSTGSPGSSTPSGATGSPGSSTPSGATGSPGTSTEPSEGSAPGSEPATSGSETPGSPAGSPTSTEEGSTSSTAESPGPGTSTPESGSASPGSTSESPSGTAPGSTSESPSGTAPGTSTPESGSASPGTSTPESGSASPGSEPATSGSETPGTSESATPESGPGSPAGSPTSTEEGTSTEPSEGSAPGTSESATPESGPGTSTEPSEGSAPGTSTEPSEGSAPGSPAGSPTSTEEGTSTEPSEGSAPGTSTEPSEGSAPGTSESATPESGPGTSESATPESGPGTSTEPSEGSAPGTSTEPSEGSAPGTSESATPESGPGTSTEPSEGSAPGSEPATSGSETPGSPAGSPTSTEEGSSTPSGATGSPGTPGSGTASSSPGSSTPSGATGSPGTSTEPSEGSAPGTSTEPSEGSAPGSEPATSGSETPGSPAGSPTSTEEGSPAGSPTSTEEGTSTEPSEGSAPGASASGAPSTGGTSESATPESGPGSPAGSPTSTEEGSPAGSPTSTEEGSTSSTAESPGPGSTSESPSGTAPGTSPSGESSTAPGTPGSGTASSSPGSSTPSGATGSPGSSPSASTGTGPGSEPATSGSETPGTSESATPESGPGSEPATSGSETPGSTSSTAESPGPGSTSSTAESPGPGTSPSGESSTAPGSEPATSGSETPGSEPATSGSETPGTSTEPSEGSAPGSTSSTAESPGPGTSTPESGSASPGSTSESPSGTAPGTSTEPSEGSAPGTSTEPSEGSAPGTSTEPSEGSAPGSSTPSGATGSPGSSPSASTGTGPGASPGTSSTGSPGSEPATSGSETPGTSESATPESGPGSPAGSPTSTEEGSSTPSGATGSPGSSPSASTGTGPGASPGTSSTGSPGTSESATPESGPGTSTEPSEGSAPGTSTEPSEGSAPGFPTIPLSRLFDNAMLRAHRLHQLAFDTYQEFEEAYIPKEQKYSFLQNPQTSLCFSESIPTPSNREETQQKSNLELLRISLLLIQSWLEPVQFLRSVFANSLVYGASDSNVYDLLKDLEEGIQTLMGRLEDGSPRTGQIFKQTYSKFDTNSHNDDALLKNYGLLYCFRKDMDKVETFLRIVQCRSVEGSCGFGLTPRSLLVGGGGTSESATPESGPGSEPATSGSETPGTSESATPESGPGSEPATSGSETPGTSESATPESGPGTSTEPSEGSAPGSPAGSPTSTEEGTSESATPESGPGSEPATSGSETPGTSESATPESGPGSPAGSPTSTEEGSPAGSPTSTEEGTSTEPSEGSAPGTSESATPESGPGTSESATPESGPGTSESATPESGPGSEPATSGSETPGSEPATSGSETPGSPAGSPTSTEEGTSTEPSEGSAPGTSTEPSEGSAPGSEPATSGSETPGTSESATPESGPGTSTEPSEGSAP

SEQ ID NO: 822 - DNA, 4251 bp, Artificial Sequence
  Description of Artificial Sequence: Synthetic polynucleotide
atggctgaacctgctggctctccaacctccactgaggaaggtgcatccccgggcaccagctctaccggttctccaggtagctctaccccgtctggtgctaccggctctccaggtagctctaccccgtctggtgctactggctctccaggtacttctactgaaccgtctgaaggcagcgcaccaggtagcgaaccggctacttccggttctgaaaccccaggtagcccagcaggttctccaacttctactgaagaaggttctaccagctctaccgcagaatctcctggtccaggtacctctactccggaaagcggctctgcatctccaggttctactagcgaatctccttctggcactgcaccaggttctactagcgaatccccgtctggtactgctccaggtacttctactcctgaaagcggttccgcttctccaggtacctctactccggaaagcggttctgcatctccaggtagcgaaccggcaacctccggctctgaaaccccaggtacctctgaaagcgctactcctgaatccggcccaggtagcccggcaggttctccgacttccactgaggaaggtacctctactgaaccttctgagggcagcgctccaggtacttctgaaagcgctaccccggagtccggtccaggtacttctactgaaccgtccgaaggtagcgcaccaggtacttctaccgaaccgtccgagggtagcgcaccaggtagcccagcaggttctcctacctccaccgaggaaggtacttctaccgaaccgtccgagggtagcgcaccaggtacttctaccgaaccttccgagggcagcgcaccaggtacttctgaaagcgctacccctgagtccggcccaggtacttctgaaagcgctactcctgaatccggtccaggtacctctactgaaccttccgaaggcagcgctccaggtacctctaccgaaccgtccgagggcagcgcaccaggtacttctgaaagcgcaacccctgaatccggtccaggtacttctactgaaccttccgaaggtagcgctccaggtagcgaacctgctacttctggttctgaaaccccaggtagcccggctggctctccgacctccaccgaggaaggtagctctaccccgtctggtgctactggttctccaggtactccgggcagcggtactgcttcttcctctccaggtagctctaccccttctggtgctactggctctccaggtacctctaccgaaccgtccgagggtagcgcaccaggtacctctactgaaccgtctgagggtagcgctccaggtagcgaaccggcaacctccggttctgaaactccaggtagccctgctggctctccgacttctactgaggaaggtagcccggctggttctccgacttctactgaggaaggtacttctaccgaaccttccgaaggtagcgctccaggtgcaagcgcaagcggcgcgccaagcacgggaggtacttctgaaagcgctactcctgagtccggcccaggtagcccggctggctctccgacttccaccgaggaaggtagcccggctggctctccaacttctactgaagaaggttctaccagctctaccgctgaatctcctggcccaggttctactagcgaatctccgtctggcaccgcaccaggtacttcccctagcggtgaatcttctactgcaccaggtacccctggcagcggtaccgcttcttcctctccaggtagctctaccccgtctggtgctactggctctccaggttctagcccgtctgcatctaccggtaccggcccaggtagcgaaccggcaacctccggctctgaaactccaggtacttctgaaagcgctactccggaatccggcccaggtagcgaaccggctacttccggctctgaaaccccaggttccaccagctctactgcagaatctccgggcccaggttctactagctctactgcagaatctccgggtccaggtacttctcctagcggcgaatcttctaccgctccaggtagcgaaccggcaacctctggctctgaaactccaggtagcgaacctgcaacctccggctctgaaaccccaggtacttctactgaaccttctgagggcagcgcaccaggttctaccagctctaccgcagaatctcctggtccaggtacctctactccggaaagcggctctgcatctccaggttctactagcgaatctccttctggcactgcaccaggtacttctaccgaaccgtccgaaggcagcgctccaggtacctctactgaaccttccgagggcagcgctccaggtacctctaccgaaccttctgaaggtagcgcaccaggtagctctactccgtctggtgcaaccggctccccaggttctagcccgtctgcttccactggtactggcccaggtgcttccccgggcaccagctctactggttctccaggtagcgaacctgctacctccggttctgaaaccccaggtacctctgaaagcgcaactccggagtctggtccaggtagccctgcaggttctcctacctccactgaggaaggtagctctactccgtctggtgcaaccggctccccaggttctagcccgtctgcttccactggtactggcccaggtgcttccccgggcaccagctctactggttctccaggtacctctgaaagcgctactccggagtctggcccaggtacctctactgaaccgtctgagggtagcgctccaggtacttctactgaaccgtccgaaggtagcgcaccaggttttccgactattccgctgtctcgtctgtttgataatgctatgctgcgtgcgcaccgtctgcaccagctggcctttgatacttaccaggaatttgaagaagcctacattcctaaagagcagaagtactctttcctgcaaaacccacagacttctctctgcttcagcgaatctattccgacgccttccaatcgcgaggaaactcagcaaaagtccaatctggaactactccgcatttctctgcttctgattcagagctggctagaaccagtgcaatttctgcgttccgtcttcgccaatagcctagtttatggcgcatccgacagcaacgtatacgatctcctgaaagatctcgaggaaggcattcagaccctgatgggtcgtctcgaggatggctctccgcgtactggtcagatcttcaagcagacttactctaaatttgatactaacagccacaatgacgatgcgcttctaaaaaactatggtctgctgtattgttttcgtaaagatatggacaaagttgaaaccttcctgcgtattgttcagtgtcgttccgttgagggcagctgtggtttctaaggtctgaccccgcgcagcctgctggtgggcggcggtggtacctctgaaagcgcaactcctgagtctggcccaggtagcgaacctgctacctccggctctgagactccaggtacctctgaaagcgcaaccccggaatctggtccaggtagcgaacctgcaacctctggctctgaaaccccaggtacctctgaaagcgctactcctgaatctggcccaggtacttctactgaaccgtccgagggcagcgcaccaggtagccctgctggctctccaacctccaccgaagaaggtacctctgaaagcgcaacccctgaatccggcccaggtagcgaaccggcaacctccggttctgaaaccccaggtacttctgaaagcgctactcctgagtccggcccaggtagcccggctggctctccgacttccaccgaggaaggtagcccggctggctctccaacttctactgaagaaggtacttctaccgaaccttccgagggcagcgcaccaggtacttctgaaagcgctacccctgagtccggcccaggtacttctgaaagcgctactcctgaatccggtccaggtacttctgaaagcgctaccccggaatctggcccaggtagcgaaccggctacttctggttctgaaaccccaggtagcgaaccggctacctccggttctgaaactccaggtagcccagcaggctctccgacttccactgaggaaggtacttctactgaaccttccgaaggcagcgcaccaggtacctctactgaaccttctgagggcagcgctccaggtagcgaacctgcaacctctggctctgaaaccccaggtacctctgaaagcgctactcctgaatctggcccaggtacttctactgaaccgtccgagggcagcgcacca

SEQ ID NO: 823 - protein, 1416 aa, Artificial Sequence
  Description of Artificial Sequence: Synthetic polypeptide
MAEPAGSPTSTEEGASPGTSSTGSPGSSTPSGATGSPGSSTPSGATGSPGTSTEPSEGSAPGSEPATSGSETPGSPAGSPTSTEEGSTSSTAESPGPGTSTPESGSASPGSTSESPSGTAPGSTSESPSGTAPGTSTPESGSASPGTSTPESGSASPGSEPATSGSETPGTSESATPESGPGSPAGSPTSTEEGTSTEPSEGSAPGTSESATPESGPGTSTEPSEGSAPGTSTEPSEGSAPGSPAGSPTSTEEGTSTEPSEGSAPGTSTEPSEGSAPGTSESATPESGPGTSESATPESGPGTSTEPSEGSAPGTSTEPSEGSAPGTSESATPESGPGTSTEPSEGSAPGSEPATSGSETPGSPAGSPTSTEEGSSTPSGATGSPGTPGSGTASSSPGSSTPSGATGSPGTSTEPSEGSAPGTSTEPSEGSAPGSEPATSGSETPGSPAGSPTSTEEGSPAGSPTSTEEGTSTEPSEGSAPGASASGAPSTGGTSESATPESGPGSPAGSPTSTEEGSPAGSPTSTEEGSTSSTAESPGPGSTSESPSGTAPGTSPSGESSTAPGTPGSGTASSSPGSSTPSGATGSPGSSPSASTGTGPGSEPATSGSETPGTSESATPESGPGSEPATSGSETPGSTSSTAESPGPGSTSSTAESPGPGTSPSGESSTAPGSEPATSGSETPGSEPATSGSETPGTSTEPSEGSAPGSTSSTAESPGPGTSTPESGSASPGSTSESPSGTAPGTSTEPSEGSAPGTSTEPSEGSAPGTSTEPSEGSAPGSSTPSGATGSPGSSPSASTGTGPGASPGTSSTGSPGSEPATSGSETPGTSESATPESGPGSPAGSPTSTEEGSSTPSGATGSPGSSPSASTGTGPGASPGTSSTGSPGTSESATPESGPGTSTEPSEGSAPGTSTEPSEGSAPGFPTIPLSRLFDNAMLRAHRLHQLAFDTYQEFEEAYIPKEQKYSFLQNPQTSLCFSESIPTPSNREETQQKSNLELLRISLLLIQSWLEPVQFLRSVFANSLVYGASDSNVYDLLKDLEEGIQTLMGRLEDGSPRTGQIFKQTYSKFDTNSHNDDALLKNYGLLYCFRKDMDKVETFLRIVQCRSVEGSCGFGGGKLTRVVGGGGTSESATPESGPGSEPATSGSETPGTSESATPESGPGSEPATSGSETPGTSESATPESGPGTSTEPSEGSAPGSPAGSPTSTEEGTSESATPESGPGSEPATSGSETPGTSESATPESGPGSPAGSPTSTEEGSPAGSPTSTEEGTSTEPSEGSAPGTSESATPESGPGTSESATPESGPGTSESATPESGPGSEPATSGSETPGSEPATSGSETPGSPAGSPTSTEEGTSTEPSEGSAPGTSTEPSEGSAPGSEPATSGSETPGTSESATPESGPGTSTEPSEGSAP

SEQ ID NO: 824 - DNA, 4251 bp, Artificial Sequence
  Description of Artificial Sequence: Synthetic polynucleotide
atggctgaacctgctggctctccaacctccactgaggaaggtgcatccccgggcaccagctctaccggttctccaggtagctctaccccgtctggtgctaccggctctccaggtagctctaccccgtctggtgctactggctctccaggtacttctactgaaccgtctgaaggcagcgcaccaggtagcgaaccggctacttccggttctgaaaccccaggtagcccagcaggttctccaacttctactgaagaaggttctaccagctctaccgcagaatctcctggtccaggtacctctactccggaaagcggctctgcatctccaggttctactagcgaatctccttctggcactgcaccaggttctactagcgaatccccgtctggtactgctccaggtacttctactcctgaaagcggttccgcttctccaggtacctctactccggaaagcggttctgcatctccaggtagcgaaccggcaacctccggctctgaaaccccaggtacctctgaaagcgctactcctgaatccggcccaggtagcccggcaggttctccgacttccactgaggaaggtacctctactgaaccttctgagggcagcgctccaggtacttctgaaagcgctaccccggagtccggtccaggtacttctactgaaccgtccgaaggtagcgcaccaggtacttctaccgaaccgtccgagggtagcgcaccaggtagcccagcaggttctcctacctccaccgaggaaggtacttctaccgaaccgtccgagggtagcgcaccaggtacttctaccgaaccttccgagggcagcgcaccaggtacttctgaaagcgctacccctgagtccggcccaggtacttctgaaagcgctactcctgaatccggtccaggtacctctactgaaccttccgaaggcagcgctccaggtacctctaccgaaccgtccgagggcagcgcaccaggtacttctgaaagcgcaacccctgaatccggtccaggtacttctactgaaccttccgaaggtagcgctccaggtagcgaacctgctacttctggttctgaaaccccaggtagcccggctggctctccgacctccaccgaggaaggtagctctaccccgtctggtgctactggttctccaggtactccgggcagcggtactgcttcttcctctccaggtagctctaccccttctggtgctactggctctccaggtacctctaccgaaccgtccgagggtagcgcaccaggtacctctactgaaccgtctgagggtagcgctccaggtagcgaaccggcaacctccggttctgaaactccaggtagccctgctggctctccgacttctactgaggaaggtagcccggctggttctccgacttctactgaggaaggtacttctaccgaaccttccgaaggtagcgctccaggtgcaagcgcaagcggcgcgccaagcacgggaggtacttctgaaagcgctactcctgagtccggcccaggtagcccggctggctctccgacttccaccgaggaaggtagcccggctggctctccaacttctactgaagaaggttctaccagctctaccgctgaatctcctggcccaggttctactagcgaatctccgtctggcaccgcaccaggtacttcccctagcggtgaatcttctactgcaccaggtacccctggcagcggtaccgcttcttcctctccaggtagctctaccccgtctggtgctactggctctccaggttctagcccgtctgcatctaccggtaccggcccaggtagcgaaccggcaacctccggctctgaaactccaggtacttctgaaagcgctactccggaatccggcccaggtagcgaaccggctacttccggctctgaaaccccaggttccaccagctctactgcagaatctccgggcccaggttctactagctctactgcagaatctccgggtccaggtacttctcctagcggcgaatcttctaccgctccaggtagcgaaccggcaacctctggctctgaaactccaggtagcgaacctgcaacctccggctctgaaaccccaggtacttctactgaaccttctgagggcagcgcaccaggttctaccagctctaccgcagaatctcctggtccaggtacctctactccggaaagcggctctgcatctccaggttctactagcgaatctccttctggcactgcaccaggtacttctaccgaaccgtccgaaggcagcgctccaggtacctctactgaaccttccgagggcagcgctccaggtacctctaccgaaccttctgaaggtagcgcaccaggtagctctactccgtctggtgcaaccggctccccaggttctagcccgtctgcttccactggtactggcccaggtgcttccccgggcaccagctctactggttctccaggtagcgaacctgctacctccggttctgaaaccccaggtacctctgaaagcgcaactccggagtctggtccaggtagccctgcaggttctcctacctccactgaggaaggtagctctactccgtctggtgcaaccggctccccaggttctagcccgtctgcttccactggtactggcccaggtgcttccccgggcaccagctctactggttctccaggtacctctgaaagcgctactccggagtctggcccaggtacctctactgaaccgtctgagggtagcgctccaggtacttctactgaaccgtccgaaggtagcgcaccaggttttccgactattccgctgtctcgtctgtttgataatgctatgctgcgtgcgcaccgtctgcaccagctggcctttgatacttaccaggaatttgaagaagcctacattcctaaagagcagaagtactctttcctgcaaaacccacagacttctctctgcttcagcgaatctattccgacgccttccaatcgcgaggaaactcagcaaaagtccaatctggaactactccgcatttctctgcttctgattcagagctggctagaaccagtgcaatttctgcgttccgtcttcgccaatagcctagtttatggcgcatccgacagcaacgtatacgatctcctgaaagatctcgaggaaggcattcagaccctgatgggtcgtctcgaggatggctctccgcgtactggtcagatcttcaagcagacttactctaaatttgatactaacagccacaatgacgatgcgcttctaaaaaactatggtctgctgtattgttttcgtaaagatatggacaaagttgaaaccttcctgcgtattgttcagtgtcgttccgttgagggcagctgtggtttctaaggtggcggcaaactgacccgcgtggtgggcggcggtggtacctctgaaagcgcaactcctgagtctggcccaggtagcgaacctgctacctccggctctgagactccaggtacctctgaaagcgcaaccccggaatctggtccaggtagcgaacctgcaacctctggctctgaaaccccaggtacctctgaaagcgctactcctgaatctggcccaggtacttctactgaaccgtccgagggcagcgcaccaggtagccctgctggctctccaacctccaccgaagaaggtacctctgaaagcgcaacccctgaatccggcccaggtagcgaaccggcaacctccggttctgaaaccccaggtacttctgaaagcgctactcctgagtccggcccaggtagcccggctggctctccgacttccaccgaggaaggtagcccggctggctctccaacttctactgaagaaggtacttctaccgaaccttccgagggcagcgcaccaggtacttctgaaagcgctacccctgagtccggcccaggtacttctgaaagcgctactcctgaatccggtccaggtacttctgaaagcgctaccccggaatctggcccaggtagcgaaccggctacttctggttctgaaaccccaggtagcgaaccggctacctccggttctgaaactccaggtagcccagcaggctctccgacttccactgaggaaggtacttctactgaaccttccgaaggcagcgcaccaggtacctctactgaaccttctgagggcagcgctccaggtagcgaacctgcaacctctggctctgaaaccccaggtacctctgaaagcgctactcctgaatctggcccaggtacttctactgaaccgtccgagggcagcgcacca

SEQ ID NO: 825 - protein, 1416 aa, Artificial Sequence
  Description of Artificial Sequence: Synthetic polypeptide
MAEPAGSPTSTEEGASPGTSSTGSPGSSTPSGATGSPGSSTPSGATGSPGTSTEPSEGSAPGSEPATSGSETPGSPAGSPTSTEEGSTSSTAESPGPGTSTPESGSASPGSTSESPSGTAPGSTSESPSGTAPGTSTPESGSASPGTSTPESGSASPGSEPATSGSETPGTSESATPESGPGSPAGSPTSTEEGTSTEPSEGSAPGTSESATPESGPGTSTEPSEGSAPGTSTEPSEGSAPGSPAGSPTSTEEGTSTEPSEGSAPGTSTEPSEGSAPGTSESATPESGPGTSESATPESGPGTSTEPSEGSAPGTSTEPSEGSAPGTSESATPESGPGTSTEPSEGSAPGSEPATSGSETPGSPAGSPTSTEEGSSTPSGATGSPGTPGSGTASSSPGSSTPSGATGSPGTSTEPSEGSAPGTSTEPSEGSAPGSEPATSGSETPGSPAGSPTSTEEGSPAGSPTSTEEGTSTEPSEGSAPGASASGAPSTGGTSESATPESGPGSPAGSPTSTEEGSPAGSPTSTEEGSTSSTAESPGPGSTSESPSGTAPGTSPSGESSTAPGTPGSGTASSSPGSSTPSGATGSPGSSPSASTGTGPGSEPATSGSETPGTSESATPESGPGSEPATSGSETPGSTSSTAESPGPGSTSSTAESPGPGTSPSGESSTAPGSEPATSGSETPGSEPATSGSETPGTSTEPSEGSAPGSTSSTAESPGPGTSTPESGSASPGSTSESPSGTAPGTSTEPSEGSAPGTSTEPSEGSAPGTSTEPSEGSAPGSSTPSGATGSPGSSPSASTGTGPGASPGTSSTGSPGSEPATSGSETPGTSESATPESGPGSPAGSPTSTEEGSSTPSGATGSPGSSPSASTGTGPGASPGTSSTGSPGTSESATPESGPGTSTEPSEGSAPGTSTEPSEGSAPGFPTIPLSRLFDNAMLRAHRLHQLAFDTYQEFEEAYIPKEQKYSFLQNPQTSLCFSESIPTPSNREETQQKSNLELLRISLLLIQSWLEPVQFLRSVFANSLVYGASDSNVYDLLKDLEEGIQTLMGRLEDGSPRTGQIFKQTYSKFDTNSHNDDALLKNYGLLYCFRKDMDKVETFLRIVQCRSVEGSCGFGGGLGPVSGVPGGTSESATPESGPGSEPATSGSETPGTSESATPESGPGSEPATSGSETPGTSESATPESGPGTSTEPSEGSAPGSPAGSPTSTEEGTSESATPESGPGSEPATSGSETPGTSESATPESGPGSPAGSPTSTEEGSPAGSPTSTEEGTSTEPSEGSAPGTSESATPESGPGTSESATPESGPGTSESATPESGPGSEPATSGSETPGSEPATSGSETPGSPAGSPTSTEEGTSTEPSEGSAPGTSTEPSEGSAPGSEPATSGSETPGTSESATPESGPGTSTEPSEGSAP

SEQ ID NO: 826 - DNA, 4251 bp, Artificial Sequence
  Description of Artificial Sequence: Synthetic polynucleotide
atggctgaacctgctggctctccaacctccactgaggaaggtgcatccccgggcaccagctctaccggttctccaggtagctctaccccgtctggtgctaccggctctccaggtagctctaccccgtctggtgctactggctctccaggtacttctactgaaccgtctgaaggcagcgcaccaggtagcgaaccggctacttccggttctgaaaccccaggtagcccagcaggttctccaacttctactgaagaaggttctaccagctctaccgcagaatctcctggtccaggtacctctactccggaaagcggctctgcatctccaggttctactagcgaatctccttctggcactgcaccaggttctactagcgaatccccgtctggtactgctccaggtacttctactcctgaaagcggttccgcttctccaggtacctctactccggaaagcggttctgcatctccaggtagcgaaccggcaacctccggctctgaaaccccaggtacctctgaaagcgctactcctgaatccggcccaggtagcccggcaggttctccgacttccactgaggaaggtacctctactgaaccttctgagggcagcgctccaggtacttctgaaagcgctaccccggagtccggtccaggtacttctactgaaccgtccgaaggtagcgcaccaggtacttctaccgaaccgtccgagggtagcgcaccaggtagcccagcaggttctcctacctccaccgaggaaggtacttctaccgaaccgtccgagggtagcgcaccaggtacttctaccgaaccttccgagggcagcgcaccaggtacttctgaaagcgctacccctgagtccggcccaggtacttctgaaagcgctactcctgaatccggtccaggtacctctactgaaccttccgaaggcagcgctccaggtacctctaccgaaccgtccgagggcagcgcaccaggtacttctgaaagcgcaacccctgaatccggtccaggtacttctactgaaccttccgaaggtagcgctccaggtagcgaacctgctacttctggttctgaaaccccaggtagcccggctggctctccgacctccaccgaggaaggtagctctaccccgtctggtgctactggttctccaggtactccgggcagcggtactgcttcttcctctccaggtagctctaccccttctggtgctactggctctccaggtacctctaccgaaccgtccgagggtagcgcaccaggtacctctactgaaccgtctgagggtagcgctccaggtagcgaaccggcaacctccggttctgaaactccaggtagccctgctggctctccgacttctactgaggaaggtagcccggctggttctccgacttctactgaggaaggtacttctaccgaaccttccgaaggtagcgctccaggtgcaagcgcaagcggcgcgccaagcacgggaggtacttctgaaagcgctactcctgagtccggcccaggtagcccggctggctctccgacttccaccgaggaaggtagcccggctggctctccaacttctactgaagaaggttctaccagctctaccgctgaatctcctggcccaggttctactagcgaatctccgtctggcaccgcaccaggtacttcccctagcggtgaatcttctactgcaccaggtacccctggcagcggtaccgcttcttcctctccaggtagctctaccccgtctggtgctactggctctccaggttctagcccgtctgcatctaccggtaccggcccaggtagcgaaccggcaacctccggctctgaaactccaggtacttctgaaagcgctactccggaatccggcccaggtagcgaaccggctacttccggctctgaaaccccaggttccaccagctctactgcagaatctccgggcccaggttctactagctctactgcagaatctccgggtccaggtacttctcctagcggcgaatcttctaccgctccaggtagcgaaccggcaacctctggctctgaaactccaggtagcgaacctgcaacctccggctctgaaaccccaggtacttctactgaaccttctgagggcagcgcaccaggttctaccagctctaccgcagaatctcctggtccaggtacctctactccggaaagcggctctgcatctccaggttctactagcgaatctccttctggcactgcaccaggtacttctaccgaaccgtccgaaggcagcgctccaggtacctctactgaaccttccgagggcagcgctccaggtacctctaccgaaccttctgaaggtagcgcaccaggtagctctactccgtctggtgcaaccggctccccaggttctagcccgtctgcttccactggtactggcccaggtgcttccccgggcaccagctctactggttctccaggtagcgaacctgctacctccggttctgaaaccccaggtacctctgaaagcgcaactccggagtctggtccaggtagccctgcaggttctcctacctccactgaggaaggtagctctactccgtctggtgcaaccggctccccaggttctagcccgtctgcttccactggtactggcccaggtgcttccccgggcaccagctctactggttctccaggtacctctgaaagcgctactccggagtctggcccaggtacctctactgaaccgtctgagggtagcgctccaggtacttctactgaaccgtccgaaggtagcgcaccaggttttccgactattccgctgtctcgtctgtttgataatgctatgctgcgtgcgcaccgtctgcaccagctggcctttgatacttaccaggaatttgaagaagcctacattcctaaagagcagaagtactctttcctgcaaaacccacagacttctctctgcttcagcgaatctattccgacgccttccaatcgcgaggaaactcagcaaaagtccaatctggaactactccgcatttctctgcttctgattcagagctggctagaaccagtgcaatttctgcgttccgtcttcgccaatagcctagtttatggcgcatccgacagcaacgtatacgatctcctgaaagatctcgaggaaggcattcagaccctgatgggtcgtctcgaggatggctctccgcgtactggtcagatcttcaagcagacttactctaaatttgatactaacagccacaatgacgatgcgcttctaaaaaactatggtctgctgtattgttttcgtaaagatatggacaaagttgaaaccttcctgcgtattgttcagtgtcgttccgttgagggcagctgtggtttctaaggtggcggcctgggcccggtgagcggcgtgccgggtggtacctctgaaagcgcaactcctgagtctggcccaggtagcgaacctgctacctccggctctgagactccaggtacctctgaaagcgcaaccccggaatctggtccaggtagcgaacctgcaacctctggctctgaaaccccaggtacctctgaaagcgctactcctgaatctggcccaggtacttctactgaaccgtccgagggcagcgcaccaggtagccctgctggctctccaacctccaccgaagaaggtacctctgaaagcgcaacccctgaatccggcccaggtagcgaaccggcaacctccggttctgaaaccccaggtacttctgaaagcgctactcctgagtccggcccaggtagcccggctggctctccgacttccaccgaggaaggtagcccggctggctctccaacttctactgaagaaggtacttctaccgaaccttccgagggcagcgcaccaggtacttctgaaagcgctacccctgagtccggcccaggtacttctgaaagcgctactcctgaatccggtccaggtacttctgaaagcgctaccccggaatctggcccaggtagcgaaccggctacttctggttctgaaaccccaggtagcgaaccggctacctccggttctgaaactccaggtagcccagcaggctctccgacttccactgaggaaggtacttctactgaaccttccgaaggcagcgcaccaggtacctctactgaaccttctgagggcagcgctccaggtagcgaacctgcaacctctggctctgaaaccccaggtacctctgaaagcgctactcctgaatctggcccaggtacttctactgaaccgtccgagggcagcgcacca

SEQ ID NO: 827 - protein, 1416 aa, Artificial Sequence
  Description of Artificial Sequence: Synthetic polypeptide
MAEPAGSPTSTEEGASPGTSSTGSPGSSTPSGATGSPGSSTPSGATGSPGTSTEPSEGSAPGSEPATSGSETPGSPAGSPTSTEEGSTSSTAESPGPGTSTPESGSASPGSTSESPSGTAPGSTSESPSGTAPGTSTPESGSASPGTSTPESGSASPGSEPATSGSETPGTSESATPESGPGSPAGSPTSTEEGTSTEPSEGSAPGTSESATPESGPGTSTEPSEGSAPGTSTEPSEGSAPGSPAGSPTSTEEGTSTEPSEGSAPGTSTEPSEGSAPGTSESATPESGPGTSESATPESGPGTSTEPSEGSAPGTSTEPSEGSAPGTSESATPESGPGTSTEPSEGSAPGSEPATSGSETPGSPAGSPTSTEEGSSTPSGATGSPGTPGSGTASSSPGSSTPSGATGSPGTSTEPSEGSAPGTSTEPSEGSAPGSEPATSGSETPGSPAGSPTSTEEGSPAGSPTSTEEGTSTEPSEGSAPGASASGAPSTGGTSESATPESGPGSPAGSPTSTEEGSPAGSPTSTEEGSTSSTAESPGPGSTSESPSGTAPGTSPSGESSTAPGTPGSGTASSSPGSSTPSGATGSPGSSPSASTGTGPGSEPATSGSETPGTSESATPESGPGSEPATSGSETPGSTSSTAESPGPGSTSSTAESPGPGTSPSGESSTAPGSEPATSGSETPGSEPATSGSETPGTSTEPSEGSAPGSTSSTAESPGPGTSTPESGSASPGSTSESPSGTAPGTSTEPSEGSAPGTSTEPSEGSAPGTSTEPSEGSAPGSSTPSGATGSPGSSPSASTGTGPGASPGTSSTGSPGSEPATSGSETPGTSESATPESGPGSPAGSPTSTEEGSSTPSGATGSPGSSPSASTGTGPGASPGTSSTGSPGTSESATPESGPGTSTEPSEGSAPGTSTEPSEGSAPGFPTIPLSRLFDNAMLRAHRLHQLAFDTYQEFEEAYIPKEQKYSFLQNPQTSLCFSESIPTPSNREETQQKSNLELLRISLLLIQSWLEPVQFLRSVFANSLVYGASDSNVYDLLKDLEEGIQTLMGRLEDGSPRTGQIFKQTYSKFDTNSHNDDALLKNYGLLYCFRKDMDKVETFLRIVQCRSVEGSCGFGAPLGLRLRGGGGTSESATPESGPGSEPATSGSETPGTSESATPESGPGSEPATSGSETPGTSESATPESGPGTSTEPSEGSAPGSPAGSPTSTEEGTSESATPESGPGSEPATSGSETPGTSESATPESGPGSPAGSPTSTEEGSPAGSPTSTEEGTSTEPSEGSAPGTSESATPESGPGTSESATPESGPGTSESATPESGPGSEPATSGSETPGSEPATSGSETPGSPAGSPTSTEEGTSTEPSEGSAPGTSTEPSEGSAPGSEPATSGSETPGTSESATPESGPGTSTEPSEGSAP

SEQ ID NO: 828 - DNA, 4251 bp, Artificial Sequence
  Description of Artificial Sequence: Synthetic polynucleotide
atggctgaacctgctggctctccaacctccactgaggaaggtgcatccccgggcaccagctctaccggttctccaggtagctctaccccgtctggtgctaccggctctccaggtagctctaccccgtctggtgctactggctctccaggtacttctactgaaccgtctgaaggcagcgcaccaggtagcgaaccggctacttccggttctgaaaccccaggtagcccagcaggttctccaacttctactgaagaaggttctaccagctctaccgcagaatctcctggtccaggtacctctactccggaaagcggctctgcatctccaggttctactagcgaatctccttctggcactgcaccaggttctactagcgaatccccgtctggtactgctccaggtacttctactcctgaaagcggttccgcttctccaggtacctctactccggaaagcggttctgcatctccaggtagcgaaccggcaacctccggctctgaaaccccaggtacctctgaaagcgctactcctgaatccggcccaggtagcccggcaggttctccgacttccactgaggaaggtacctctactgaaccttctgagggcagcgctccaggtacttctgaaagcgctaccccggagtccggtccaggtacttctactgaaccgtccgaaggtagcgcaccaggtacttctaccgaaccgtccgagggtagcgcaccaggtagcccagcaggttctcctacctccaccgaggaaggtacttctaccgaaccgtccgagggtagcgcaccaggtacttctaccgaaccttccgagggcagcgcaccaggtacttctgaaagcgctacccctgagtccggcccaggtacttctgaaagcgctactcctgaatccggtccaggtacctctactgaaccttccgaaggcagcgctccaggtacctctaccgaaccgtccgagggcagcgcaccaggtacttctgaaagcgcaacccctgaatccggtccaggtacttctactgaaccttccgaaggtagcgctccaggtagcgaacctgctacttctggttctgaaaccccaggtagcccggctggctctccgacctccaccgaggaaggtagctctaccccgtctggtgctactggttctccaggtactccgggcagcggtactgcttcttcctctccaggtagctctaccccttctggtgctactggctctccaggtacctctaccgaaccgtccgagggtagcgcaccaggtacctctactgaaccgtctgagggtagcgctccaggtagcgaaccggcaacctccggttctgaaactccaggtagccctgctggctctccgacttctactgaggaaggtagcccggctggttctccgacttctactgaggaaggtacttctaccgaaccttccgaaggtagcgctccaggtgcaagcgcaagcggcgcgccaagcacgggaggtacttctgaaagcgctactcctgagtccggcccaggtagcccggctggctctccgacttccaccgaggaaggtagcccggctggctctccaacttctactgaagaaggttctaccagctctaccgctgaatctcctggcccaggttctactagcgaatctccgtctggcaccgcaccaggtacttcccctagcggtgaatcttctactgcaccaggtacccctggcagcggtaccgcttcttcctctccaggtagctctaccccgtctggtgctactggctctccaggttctagcccgtctgcatctaccggtaccggcccaggtagcgaaccggcaacctccggctctgaaactccaggtacttctgaaagcgctactccggaatccggcccaggtagcgaaccggctacttccggctctgaaaccccaggttccaccagctctactgcagaatctccgggcccaggttctactagctctactgcagaatctccgggtccaggtacttctcctagcggcgaatcttctaccgctccaggtagcgaaccggcaacctctggctctgaaactccaggtagcgaacctgcaacctccggctctgaaaccccaggtacttctactgaaccttctgagggcagcgcaccaggttctaccagctctaccgcagaatctcctggtccaggtacctctactccggaaagcggctctgcatctccaggttctactagcgaatctccttctggcactgcaccaggtacttctaccgaaccgtccgaaggcagcgctccaggtacctctactgaaccttccgagggcagcgctccaggtacctctaccgaaccttctgaaggtagcgcaccaggtagctctactccgtctggtgcaaccggctccccaggttctagcccgtctgcttccactggtactggcccaggtgcttccccgggcaccagctctactggttctccaggtagcgaacctgctacctccggttctgaaaccccaggtacctctgaaagcgcaactccggagtctggtccaggtagccctgcaggttctcctacctccactgaggaaggtagctctactccgtctggtgcaaccggctccccaggttctagcccgtctgcttccactggtactggcccaggtgcttccccgggcaccagctctactggttctccaggtacctctgaaagcgctactccggagtctggcccaggtacctctactgaaccgtctgagggtagcgctccaggtacttctactgaaccgtccgaaggtagcgcaccaggttttccgactattccgctgtctcgtctgtttgataatgctatgctgcgtgcgcaccgtctgcaccagctggcctttgatacttaccaggaatttgaagaagcctacattcctaaagagcagaagtactctttcctgcaaaacccacagacttctctctgcttcagcgaatctattccgacgccttccaatcgcgaggaaactcagcaaaagtccaatctggaactactccgcatttctctgcttctgattcagagctggctagaaccagtgcaatttctgcgttccgtcttcgccaatagcctagtttatggcgcatccgacagcaacgtatacgatctcctgaaagatctcgaggaaggcattcagaccctgatgggtcgtctcgaggatggctctccgcgtactggtcagatcttcaagcagacttactctaaatttgatactaacagccacaatgacgatgcgcttctaaaaaactatggtctgctgtattgttttcgtaaagatatggacaaagttgaaaccttcctgcgtattgttcagtgtcgttccgttgagggcagctgtggtttctaaggtgcgccgctgggcctgcgcctgcgcggcggcggtggtacctctgaaagcgcaactcctgagtctggcccaggtagcgaacctgctacctccggctctgagactccaggtacctctgaaagcgcaaccccggaatctggtccaggtagcgaacctgcaacctctggctctgaaaccccaggtacctctgaaagcgctactcctgaatctggcccaggtacttctactgaaccgtccgagggcagcgcaccaggtagccctgctggctctccaacctccaccgaagaaggtacctctgaaagcgcaacccctgaatccggcccaggtagcgaaccggcaacctccggttctgaaaccccaggtacttctgaaagcgctactcctgagtccggcccaggtagcccggctggctctccgacttccaccgaggaaggtagcccggctggctctccaacttctactgaagaaggtacttctaccgaaccttccgagggcagcgcaccaggtacttctgaaagcgctacccctgagtccggcccaggtacttctgaaagcgctactcctgaatccggtccaggtacttctgaaagcgctaccccggaatctggcccaggtagcgaaccggctacttctggttctgaaaccccaggtagcgaaccggctacctccggttctgaaactccaggtagcccagcaggctctccgacttccactgaggaaggtacttctactgaaccttccgaaggcagcgcaccaggtacctctactgaaccttctgagggcagcgctccaggtagcgaacctgcaacctctggctctgaaaccccaggtacctctgaaagcgctactcctgaatctggcccaggtacttctactgaaccgtccgagggcagcgcacca

SEQ ID NO: 829 - protein, 973 aa, Artificial Sequence
  Description of Artificial Sequence: Synthetic polypeptide
MAEPAGSPTSTEEGTPGSGTASSSPGSSTPSGATGSPGASPGTSSTGSPGSPAGSPTSTEEGTSESATPESGPGTSTEPSEGSAPGSPAGSPTSTEEGTSTEPSEGSAPGTSTEPSEGSAPGTSESATPESGPGSEPATSGSETPGSEPATSGSETPGSPAGSPTSTEEGTSESATPESGPGTSTEPSEGSAPGTSTEPSEGSAPGSPAGSPTSTEEGTSTEPSEGSAPGTSTEPSEGSAPGTSESATPESGPGTSTEPSEGSAPGTSESATPESGPGSEPATSGSETPGTSTEPSEGSAPGTSTEPSEGSAPGTSESATPESGPGTSESATPESGPGSPAGSPTSTEEGTSESATPESGPGSEPATSGSETPGTSESATPESGPGTSTEPSEGSAPGTSTEPSEGSAPGTSTEPSEGSAPGTSTEPSEGSAPGTSTEPSEGSAPGTSTEPSEGSAPGSPAGSPTSTEEGTSTEPSEGSAPGTSESATPESGPGSEPATSGSETPGTSESATPESGPGSEPATSGSETPGTSESATPESGPGTSTEPSEGSAPGTSESATPESGPGSPAGSPTSTEEGSPAGSPTSTEEGSPAGSPTSTEEGTSESATPESGPGTSTEPSEGSAPGFPTIPLSRLFDNAMLRAHRLHQLAFDTYQEFEEAYIPKEQKYSFLQNPQTSLCFSESIPTPSNREETQQKSNLELLRISLLLIQSWLEPVQFLRSVFANSLVYGASDSNVYDLLKDLEEGIQTLMGRLEDGSPRTGQIFKQTYSKFDTNSHNDDALLKNYGLLYCFRKDMDKVETFLRIVQCRSVEGSCGFGLTPRSLLVGGGGSEPATSGSETPGTSESATPESGPGSEPATSGSETPGSPAGSPTSTEEGTSTEPSEGSAPGSEPATSGSETPGSEPATSGSETPGSEPATSGSETPGTSTEPSEGSAPGTSESATPESGPGSEPATSGSETPGTSTEPSEGSAP

SEQ ID NO: 830 - DNA, 2922 bp, Artificial Sequence
  Description of Artificial Sequence: Synthetic polynucleotide
atggctgaacctgctggctctccaacctccactgaggaaggtaccccgggtagcggtactgcttcttcctctccaggtagctctaccccttctggtgcaaccggctctccaggtgcttctccgggcaccagctctaccggttctccaggtagcccggctggctctcctacctctactgaggaaggtacttctgaaagcgctactcctgagtctggtccaggtacctctactgaaccgtccgaaggtagcgctccaggtagcccagcaggctctccgacttccactgaggaaggtacttctactgaaccttccgaaggcagcgcaccaggtacctctactgaaccttctgagggcagcgctccaggtacttctgaaagcgctaccccggaatctggcccaggtagcgaaccggctacttctggttctgaaaccccaggtagcgaaccggctacctccggttctgaaactccaggtagcccggcaggctctccgacctctactgaggaaggtacttctgaaagcgcaaccccggagtccggcccaggtacctctaccgaaccgtctgagggcagcgcaccaggtacttctaccgaaccgtccgagggtagcgcaccaggtagcccagcaggttctcctacctccaccgaggaaggtacttctaccgaaccgtccgagggtagcgcaccaggtacctctactgaaccttctgagggcagcgctccaggtacttctgaaagcgctaccccggagtccggtccaggtacttctactgaaccgtccgaaggtagcgcaccaggtacttctgaaagcgcaacccctgaatccggtccaggtagcgaaccggctacttctggctctgagactccaggtacttctaccgaaccgtccgaaggtagcgcaccaggtacttctactgaaccgtctgaaggtagcgcaccaggtacttctgaaagcgcaaccccggaatccggcccaggtacctctgaaagcgcaaccccggagtccggcccaggtagccctgctggctctccaacctccaccgaagaaggtacctctgaaagcgcaacccctgaatccggcccaggtagcgaaccggcaacctccggttctgaaaccccaggtacctctgaaagcgctactccggagtctggcccaggtacctctactgaaccgtctgagggtagcgctccaggtacttctactgaaccgtccgaaggtagcgcaccaggtacttctaccgaaccgtccgaaggcagcgctccaggtacctctactgaaccttccgagggcagcgctccaggtacctctaccgaaccttctgaaggtagcgcaccaggtacttctaccgaaccgtccgagggtagcgcaccaggtagcccagcaggttctcctacctccaccgaggaaggtacttctaccgaaccgtccgagggtagcgcaccaggtacctctgaaagcgcaactcctgagtctggcccaggtagcgaacctgctacctccggctctgagactccaggtacctctgaaagcgcaaccccggaatctggtccaggtagcgaacctgcaacctctggctctgaaaccccaggtacctctgaaagcgctactcctgaatctggcccaggtacttctactgaaccgtccgagggcagcgcaccaggtacttctgaaagcgctactcctgagtccggcccaggtagcccggctggctctccgacttccaccgaggaaggtagcccggctggctctccaacttctactgaagaaggtagcccggcaggctctccgacctctactgaggaaggtacttctgaaagcgcaaccccggagtccggcccaggtacctctaccgaaccgtctgagggcagcgcaccaggttttccgactattccgctgtctcgtctgtttgataatgctatgctgcgtgcgcaccgtctgcaccagctggcctttgatacttaccaggaatttgaagaagcctacattcctaaagagcagaagtactctttcctgcaaaacccacagacttctctctgcttcagcgaatctattccgacgccttccaatcgcgaggaaactcagcaaaagtccaatctggaactactccgcatttctctgcttctgattcagagctggctagaaccagtgcaatttctgcgttccgtcttcgccaatagcctagtttatggcgcatccgacagcaacgtatacgatctcctgaaagatctcgaggaaggcattcagaccctgatgggtcgtctcgaggatggctctccgcgtactggtcagatcttcaagcagacttactctaaatttgatactaacagccacaatgacgatgcgcttctaaaaaactatggtctgctgtattgttttcgtaaagatatggacaaagttgaaaccttcctgcgtattgttcagtgtcgttccgttgagggcagctgtggtttctaaggtctgaccccgcgcagcctgctggtgggcggcggtggtagcgaaccggcaacttccggctctgaaaccccaggtacttctgaaagcgctactcctgagtctggcccaggtagcgaacctgctacctctggctctgaaaccccaggtagcccggcaggctctccgacttccaccgaggaaggtacctctactgaaccttctgagggtagcgctccaggtagcgaaccggcaacctctggctctgaaaccccaggtagcgaacctgctacctccggctctgaaactccaggtagcgaaccggctacttccggttctgaaactccaggtacctctaccgaaccttccgaaggcagcgcaccaggtacttctgaaagcgcaacccctgaatccggtccaggtagcgaaccggctacttctggctctgagactccaggtacttctaccgaaccgtccgaaggtagcgcacca

SEQ ID NO: 831 - protein, 973 aa, Artificial Sequence
  Description of Artificial Sequence: Synthetic polypeptide
MAEPAGSPTSTEEGTPGSGTASSSPGSSTPSGATGSPGASPGTSSTGSPGSPAGSPTSTEEGTSESATPESGPGTSTEPSEGSAPGSPAGSPTSTEEGTSTEPSEGSAPGTSTEPSEGSAPGTSESATPESGPGSEPATSGSETPGSEPATSGSETPGSPAGSPTSTEEGTSESATPESGPGTSTEPSEGSAPGTSTEPSEGSAPGSPAGSPTSTEEGTSTEPSEGSAPGTSTEPSEGSAPGTSESATPESGPGTSTEPSEGSAPGTSESATPESGPGSEPATSGSETPGTSTEPSEGSAPGTSTEPSEGSAPGTSESATPESGPGTSESATPESGPGSPAGSPTSTEEGTSESATPESGPGSEPATSGSETPGTSESATPESGPGTSTEPSEGSAPGTSTEPSEGSAPGTSTEPSEGSAPGTSTEPSEGSAPGTSTEPSEGSAPGTSTEPSEGSAPGSPAGSPTSTEEGTSTEPSEGSAPGTSESATPESGPGSEPATSGSETPGTSESATPESGPGSEPATSGSETPGTSESATPESGPGTSTEPSEGSAPGTSESATPESGPGSPAGSPTSTEEGSPAGSPTSTEEGSPAGSPTSTEEGTSESATPESGPGTSTEPSEGSAPGFPTIPLSRLFDNAMLRAHRLHQLAFDTYQEFEEAYIPKEQKYSFLQNPQTSLCFSESIPTPSNREETQQKSNLELLRISLLLIQSWLEPVQFLRSVFANSLVYGASDSNVYDLLKDLEEGIQTLMGRLEDGSPRTGQIFKQTYSKFDTNSHNDDALLKNYGLLYCFRKDMDKVETFLRIVQCRSVEGSCGFGGGKLTRVVGGGGSEPATSGSETPGTSESATPESGPGSEPATSGSETPGSPAGSPTSTEEGTSTEPSEGSAPGSEPATSGSETPGSEPATSGSETPGSEPATSGSETPGTSTEPSEGSAPGTSESATPESGPGSEPATSGSETPGTSTEPSEGSAP

SEQ ID NO: 832 - DNA, 2922 bp, Artificial Sequence
  Description of Artificial Sequence: Synthetic polynucleotide
atggctgaacctgctggctctccaacctccactgaggaaggtaccccgggtagcggtactgcttcttcctctccaggtagctctaccccttctggtgcaaccggctctccaggtgcttctccgggcaccagctctaccggttctccaggtagcccggctggctctcctacctctactgaggaaggtacttctgaaagcgctactcctgagtctggtccaggtacctctactgaaccgtccgaaggtagcgctccaggtagcccagcaggctctccgacttccactgaggaaggtacttctactgaaccttccgaaggcagcgcaccaggtacctctactgaaccttctgagggcagcgctccaggtacttctgaaagcgctaccccggaatctggcccaggtagcgaaccggctacttctggttctgaaaccccaggtagcgaaccggctacctccggttctgaaactccaggtagcccggcaggctctccgacctctactgaggaaggtacttctgaaagcgcaaccccggagtccggcccaggtacctctaccgaaccgtctgagggcagcgcaccaggtacttctaccgaaccgtccgagggtagcgcaccaggtagcccagcaggttctcctacctccaccgaggaaggtacttctaccgaaccgtccgagggtagcgcaccaggtacctctactgaaccttctgagggcagcgctccaggtacttctgaaagcgctaccccggagtccggtccaggtacttctactgaaccgtccgaaggtagcgcaccaggtacttctgaaagcgcaacccctgaatccggtccaggtagcgaaccggctacttctggctctgagactccaggtacttctaccgaaccgtccgaaggtagcgcaccaggtacttctactgaaccgtctgaaggtagcgcaccaggtacttctgaaagcgcaaccccggaatccggcccaggtacctctgaaagcgcaaccccggagtccggcccaggtagccctgctggctctccaacctccaccgaagaaggtacctctgaaagcgcaacccctgaatccggcccaggtagcgaaccggcaacctccggttctgaaaccccaggtacctctgaaagcgctactccggagtctggcccaggtacctctactgaaccgtctgagggtagcgctccaggtacttctactgaaccgtccgaaggtagcgcaccaggtacttctaccgaaccgtccgaaggcagcgctccaggtacctctactgaaccttccgagggcagcgctccaggtacctctaccgaaccttctgaaggtagcgcaccaggtacttctaccgaaccgtccgagggtagcgcaccaggtagcccagcaggttctcctacctccaccgaggaaggtacttctaccgaaccgtccgagggtagcgcaccaggtacctctgaaagcgcaactcctgagtctggcccaggtagcgaacctgctacctccggctctgagactccaggtacctctgaaagcgcaaccccggaatctggtccaggtagcgaacctgcaacctctggctctgaaaccccaggtacctctgaaagcgctactcctgaatctggcccaggtacttctactgaaccgtccgagggcagcgcaccaggtacttctgaaagcgctactcctgagtccggcccaggtagcccggctggctctccgacttccaccgaggaaggtagcccggctggctctccaacttctactgaagaaggtagcccggcaggctctccgacctctactgaggaaggtacttctgaaagcgcaaccccggagtccggcccaggtacctctaccgaaccgtctgagggcagcgcaccaggttttccgactattccgctgtctcgtctgtttgataatgctatgctgcgtgcgcaccgtctgcaccagctggcctttgatacttaccaggaatttgaagaagcctacattcctaaagagcagaagtactctttcctgcaaaacccacagacttctctctgcttcagcgaatctattccgacgccttccaatcgcgaggaaactcagcaaaagtccaatctggaactactccgcatttctctgcttctgattcagagctggctagaaccagtgcaatttctgcgttccgtcttcgccaatagcctagtttatggcgcatccgacagcaacgtatacgatctcctgaaagatctcgaggaaggcattcagaccctgatgggtcgtctcgaggatggctctccgcgtactggtcagatcttcaagcagacttactctaaatttgatactaacagccacaatgacgatgcgcttctaaaaaactatggtctgctgtattgttttcgtaaagatatggacaaagttgaaaccttcctgcgtattgttcagtgtcgttccgttgagggcagctgtggtttctaaggtggcggcaaactgacccgcgtggtgggcggcggtggtagcgaaccggcaacttccggctctgaaaccccaggtacttctgaaagcgctactcctgagtctggcccaggtagcgaacctgctacctctggctctgaaaccccaggtagcccggcaggctctccgacttccaccgaggaaggtacctctactgaaccttctgagggtagcgctccaggtagcgaaccggcaacctctggctctgaaaccccaggtagcgaacctgctacctccggctctgaaactccaggtagcgaaccggctacttccggttctgaaactccaggtacctctaccgaaccttccgaaggcagcgcaccaggtacttctgaaagcgcaacccctgaatccggtccaggtagcgaaccggctacttctggctctgagactccaggtacttctaccgaaccgtccgaaggtagcgcacca

SEQ ID NO: 833 - protein, 973 aa, Artificial Sequence
  Description of Artificial Sequence: Synthetic polypeptide
MAEPAGSPTSTEEGTPGSGTASSSPGSSTPSGATGSPGASPGTSSTGSPGSPAGSPTSTEEGTSESATPESGPGTSTEPSEGSAPGSPAGSPTSTEEGTSTEPSEGSAPGTSTEPSEGSAPGTSESATPESGPGSEPATSGSETPGSEPATSGSETPGSPAGSPTSTEEGTSESATPESGPGTSTEPSEGSAPGTSTEPSEGSAPGSPAGSPTSTEEGTSTEPSEGSAPGTSTEPSEGSAPGTSESATPESGPGTSTEPSEGSAPGTSESATPESGPGSEPATSGSETPGTSTEPSEGSAPGTSTEPSEGSAPGTSESATPESGPGTSESATPESGPGSPAGSPTSTEEGTSESATPESGPGSEPATSGSETPGTSESATPESGPGTSTEPSEGSAPGTSTEPSEGSAPGTSTEPSEGSAPGTSTEPSEGSAPGTSTEPSEGSAPGTSTEPSEGSAPGSPAGSPTSTEEGTSTEPSEGSAPGTSESATPESGPGSEPATSGSETPGTSESATPESGPGSEPATSGSETPGTSESATPESGPGTSTEPSEGSAPGTSESATPESGPGSPAGSPTSTEEGSPAGSPTSTEEGSPAGSPTSTEEGTSESATPESGPGTSTEPSEGSAPGFPTIPLSRLFDNAMLRAHRLHQLAFDTYQEFEEAYIPKEQKYSFLQNPQTSLCFSESIPTPSNREETQQKSNLELLRISLLLIQSWLEPVQFLRSVFANSLVYGASDSNVYDLLKDLEEGIQTLMGRLEDGSPRTGQIFKQTYSKFDTNSHNDDALLKNYGLLYCFRKDMDKVETFLRIVQCRSVEGSCGFGGGLGPVSGVPGGSEPATSGSETPGTSESATPESGPGSEPATSGSETPGSPAGSPTSTEEGTSTEPSEGSAPGSEPATSGSETPGSEPATSGSETPGSEPATSGSETPGTSTEPSEGSAPGTSESATPESGPGSEPATSGSETPGTSTEPSEGSAP

SEQ ID NO: 834 - DNA, 2922 bp, Artificial Sequence
  Description of Artificial Sequence: Synthetic polynucleotide
atggctgaacctgctggctctccaacctccactgaggaaggtaccccgggtagcggtactgcttcttcctctccaggtagctctaccccttctggtgcaaccggctctccaggtgcttctccgggcaccagctctaccggttctccaggtagcccggctggctctcctacctctactgaggaaggtacttctgaaagcgctactcctgagtctggtccaggtacctctactgaaccgtccgaaggtagcgctccaggtagcccagcaggctctccgacttccactgaggaaggtacttctactgaaccttccgaaggcagcgcaccaggtacctctactgaaccttctgagggcagcgctccaggtacttctgaaagcgctaccccggaatctggcccaggtagcgaaccggctacttctggttctgaaaccccaggtagcgaaccggctacctccggttctgaaactccaggtagcccggcaggctctccgacctctactgaggaaggtacttctgaaagcgcaaccccggagtccggcccaggtacctctaccgaaccgtctgagggcagcgcaccaggtacttctaccgaaccgtccgagggtagcgcaccaggtagcccagcaggttctcctacctccaccgaggaaggtacttctaccgaaccgtccgagggtagcgcaccaggtacctctactgaaccttctgagggcagcgctccaggtacttctgaaagcgctaccccggagtccggtccaggtacttctactgaaccgtccgaaggtagcgcaccaggtacttctgaaagcgcaacccctgaatccggtccaggtagcgaaccggctacttctggctctgagactccaggtacttctaccgaaccgtccgaaggtagcgcaccaggtacttctactgaaccgtctgaaggtagcgcaccaggtacttctgaaagcgcaaccccggaatccggcccaggtacctctgaaagcgcaaccccggagtccggcccaggtagccctgctggctctccaacctccaccgaagaaggtacctctgaaagcgcaacccctgaatccggcccaggtagcgaaccggcaacctccggttctgaaaccccaggtacctctgaaagcgctactccggagtctggcccaggtacctctactgaaccgtctgagggtagcgctccaggtacttctactgaaccgtccgaaggtagcgcaccaggtacttctaccgaaccgtccgaaggcagcgctccaggtacctctactgaaccttccgagggcagcgctccaggtacctctaccgaaccttctgaaggtagcgcaccaggtacttctaccgaaccgtccgagggtagcgcaccaggtagcccagcaggttctcctacctccaccgaggaaggtacttctaccgaaccgtccgagggtagcgcaccaggtacctctgaaagcgcaactcctgagtctggcccaggtagcgaacctgctacctccggctctgagactccaggtacctctgaaagcgcaaccccggaatctggtccaggtagcgaacctgcaacctctggctctgaaaccccaggtacctctgaaagcgctactcctgaatctggcccaggtacttctactgaaccgtccgagggcagcgcaccaggtacttctgaaagcgctactcctgagtccggcccaggtagcccggctggctctccgacttccaccgaggaaggtagcccggctggctctccaacttctactgaagaaggtagcccggcaggctctccgacctctactgaggaaggtacttctgaaagcgcaaccccggagtccggcccaggtacctctaccgaaccgtctgagggcagcgcaccaggttttccgactattccgctgtctcgtctgtttgataatgctatgctgcgtgcgcaccgtctgcaccagctggcctttgatacttaccaggaatttgaagaagcctacattcctaaagagcagaagtactctttcctgcaaaacccacagacttctctctgcttcagcgaatctattccgacgccttccaatcgcgaggaaactcagcaaaagtccaatctggaactactccgcatttctctgcttctgattcagagctggctagaaccagtgcaatttctgcgttccgtcttcgccaatagcctagtttatggcgcatccgacagcaacgtatacgatctcctgaaagatctcgaggaaggcattcagaccctgatgggtcgtctcgaggatggctctccgcgtactggtcagatcttcaagcagacttactctaaatttgatactaacagccacaatgacgatgcgcttctaaaaaactatggtctgctgtattgttttcgtaaagatatggacaaagttgaaaccttcctgcgtattgttcagtgtcgttccgttgagggcagctgtggtttctaaggtggcggcctgggcccggtgagcggcgtgccgggtggtagcgaaccggcaacttccggctctgaaaccccaggtacttctgaaagcgctactcctgagtctggcccaggtagcgaacctgctacctctggctctgaaaccccaggtagcccggcaggctctccgacttccaccgaggaaggtacctctactgaaccttctgagggtagcgctccaggtagcgaaccggcaacctctggctctgaaaccccaggtagcgaacctgctacctccggctctgaaactccaggtagcgaaccggctacttccggttctgaaactccaggtacctctaccgaaccttccgaaggcagcgcaccaggtacttctgaaagcgcaacccctgaatccggtccaggtagcgaaccggctacttctggctctgagactccaggtacttctaccgaaccgtccgaaggtagcgcacca

SEQ ID NO: 835 - protein, 973 aa, Artificial Sequence
  Description of Artificial Sequence: Synthetic polypeptide
MAEPAGSPTSTEEGTPGSGTASSSPGSSTPSGATGSPGASPGTSSTGSPGSPAGSPTSTEEGTSESATPESGPGTSTEPSEGSAPGSPAGSPTSTEEGTSTEPSEGSAPGTSTEPSEGSAPGTSESATPESGPGSEPATSGSETPGSEPATSGSETPGSPAGSPTSTEEGTSESATPESGPGTSTEPSEGSAPGTSTEPSEGSAPGSPAGSPTSTEEGTSTEPSEGSAPGTSTEPSEGSAPGTSESATPESGPGTSTEPSEGSAPGTSESATPESGPGSEPATSGSETPGTSTEPSEGSAPGTSTEPSEGSAPGTSESATPESGPGTSESATPESGPGSPAGSPTSTEEGTSESATPESGPGSEPATSGSETPGTSESATPESGPGTSTEPSEGSAPGTSTEPSEGSAPGTSTEPSEGSAPGTSTEPSEGSAPGTSTEPSEGSAPGTSTEPSEGSAPGSPAGSPTSTEEGTSTEPSEGSAPGTSESATPESGPGSEPATSGSETPGTSESATPESGPGSEPATSGSETPGTSESATPESGPGTSTEPSEGSAPGTSESATPESGPGSPAGSPTSTEEGSPAGSPTSTEEGSPAGSPTSTEEGTSESATPESGPGTSTEPSEGSAPGFPTIPLSRLFDNAMLRAHRLHQLAFDTYQEFEEAYIPKEQKYSFLQNPQTSLCFSESIPTPSNREETQQKSNLELLRISLLLIQSWLEPVQFLRSVFANSLVYGASDSNVYDLLKDLEEGIQTLMGRLEDGSPRTGQIFKQTYSKFDTNSHNDDALLKNYGLLYCFRKDMDKVETFLRIVQCRSVEGSCGFGAPLGLRLRGGGGSEPATSGSETPGTSESATPESGPGSEPATSGSETPGSPAGSPTSTEEGTSTEPSEGSAPGSEPATSGSETPGSEPATSGSETPGSEPATSGSETPGTSTEPSEGSAPGTSESATPESGPGSEPATSGSETPGTSTEPSEGSAP

SEQ ID NO: 836 - DNA, 2922 bp, Artificial Sequence
  Description of Artificial Sequence: Synthetic polynucleotide
atggctgaacctgctggctctccaacctccactgaggaaggtaccccgggtagcggtactgcttcttcctctccaggtagctctaccccttctggtgcaaccggctctccaggtgcttctccgggcaccagctctaccggttctccaggtagcccggctggctctcctacctctactgaggaaggtacttctgaaagcgctactcctgagtctggtccaggtacctctactgaaccgtccgaaggtagcgctccaggtagcccagcaggctctccgacttccactgaggaaggtacttctactgaaccttccgaaggcagcgcaccaggtacctctactgaaccttctgagggcagcgctccaggtacttctgaaagcgctaccccggaatctggcccaggtagcgaaccggctacttctggttctgaaaccccaggtagcgaaccggctacctccggttctgaaactccaggtagcccggcaggctctccgacctctactgaggaaggtacttctgaaagcgcaaccccggagtccggcccaggtacctctaccgaaccgtctgagggcagcgcaccaggtacttctaccgaaccgtccgagggtagcgcaccaggtagcccagcaggttctcctacctccaccgaggaaggtacttctaccgaaccgtccgagggtagcgcaccaggtacctctactgaaccttctgagggcagcgctccaggtacttctgaaagcgctaccccggagtccggtccaggtacttctactgaaccgtccgaaggtagcgcaccaggtacttctgaaagcgcaacccctgaatccggtccaggtagcgaaccggctacttctggctctgagactccaggtacttctaccgaaccgtccgaaggtagcgcaccaggtacttctactgaaccgtctgaaggtagcgcaccaggtacttctgaaagcgcaaccccggaatccggcccaggtacctctgaaagcgcaaccccggagtccggcccaggtagccctgctggctctccaacctccaccgaagaaggtacctctgaaagcgcaacccctgaatccggcccaggtagcgaaccggcaacctccggttctgaaaccccaggtacctctgaaagcgctactccggagtctggcccaggtacctctactgaaccgtctgagggtagcgctccaggtacttctactgaaccgtccgaaggtagcgcaccaggtacttctaccgaaccgtccgaaggcagcgctccaggtacctctactgaaccttccgagggcagcgctccaggtacctctaccgaaccttctgaaggtagcgcaccaggtacttctaccgaaccgtccgagggtagcgcaccaggtagcccagcaggttctcctacctccaccgaggaaggtacttctaccgaaccgtccgagggtagcgcaccaggtacctctgaaagcgcaactcctgagtctggcccaggtagcgaacctgctacctccggctctgagactccaggtacctctgaaagcgcaaccccggaatctggtccaggtagcgaacctgcaacctctggctctgaaaccccaggtacctctgaaagcgctactcctgaatctggcccaggtacttctactgaaccgtccgagggcagcgcaccaggtacttctgaaagcgctactcctgagtccggcccaggtagcccggctggctctccgacttccaccgaggaaggtagcccggctggctctccaacttctactgaagaaggtagcccggcaggctctccgacctctactgaggaaggtacttctgaaagcgcaaccccggagtccggcccaggtacctctaccgaaccgtctgagggcagcgcaccaggttttccgactattccgctgtctcgtctgtttgataatgctatgctgcgtgcgcaccgtctgcaccagctggcctttgatacttaccaggaatttgaagaagcctacattcctaaagagcagaagtactctttcctgcaaaacccacagacttctctctgcttcagcgaatctattccgacgccttccaatcgcgaggaaactcagcaaaagtccaatctggaactactccgcatttctctgcttctgattcagagctggctagaaccagtgcaatttctgcgttccgtcttcgccaatagcctagtttatggcgcatccgacagcaacgtatacgatctcctgaaagatctcgaggaaggcattcagaccctgatgggtcgtctcgaggatggctctccgcgtactggtcagatcttcaagcagacttactctaaatttgatactaacagccacaatgacgatgcgcttctaaaaaactatggtctgctgtattgttttcgtaaagatatggacaaagttgaaaccttcctgcgtattgttcagtgtcgttccgttgagggcagctgtggtttctaaggtgcgccgctgggcctgcgcctgcgcggcggcggtggtagcgaaccggcaacttccggctctgaaaccccaggtacttctgaaagcgctactcctgagtctggcccaggtagcgaacctgctacctctggctctgaaaccccaggtagcccggcaggctctccgacttccaccgaggaaggtacctctactgaaccttctgagggtagcgctccaggtagcgaaccggcaacctctggctctgaaaccccaggtagcgaacctgctacctccggctctgaaactccaggtagcgaaccggctacttccggttctgaaactccaggtacctctaccgaaccttccgaaggcagcgcaccaggtacttctgaaagcgcaacccctgaatccggtccaggtagcgaaccggctacttctggctctgagactccaggtacttctaccgaaccgtccgaaggtagcgcacca

SEQ ID NO: 837 - protein, 1117 aa, Artificial Sequence
  Description of Artificial Sequence: Synthetic polypeptide
MAEPAGSPTSTEEGTPGSGTASSSPGSSTPSGATGSPGASPGTSSTGSPGSPAGSPTSTEEGTSESATPESGPGTSTEPSEGSAPGSPAGSPTSTEEGTSTEPSEGSAPGTSTEPSEGSAPGTSESATPESGPGSEPATSGSETPGSEPATSGSETPGSPAGSPTSTEEGTSESATPESGPGTSTEPSEGSAPGTSTEPSEGSAPGSPAGSPTSTEEGTSTEPSEGSAPGTSTEPSEGSAPGTSESATPESGPGTSTEPSEGSAPGTSESATPESGPGSEPATSGSETPGTSTEPSEGSAPGTSTEPSEGSAPGTSESATPESGPGTSESATPESGPGSPAGSPTSTEEGTSESATPESGPGSEPATSGSETPGTSESATPESGPGTSTEPSEGSAPGTSTEPSEGSAPGTSTEPSEGSAPGTSTEPSEGSAPGTSTEPSEGSAPGTSTEPSEGSAPGSPAGSPTSTEEGTSTEPSEGSAPGTSESATPESGPGSEPATSGSETPGTSESATPESGPGSEPATSGSETPGTSESATPESGPGTSTEPSEGSAPGTSESATPESGPGSPAGSPTSTEEGSPAGSPTSTEEGSPAGSPTSTEEGTSESATPESGPGTSTEPSEGSAPGFPTIPLSRLFDNAMLRAHRLHQLAFDTYQEFEEAYIPKEQKYSFLQNPQTSLCFSESIPTPSNREETQQKSNLELLRISLLLIQSWLEPVQFLRSVFANSLVYGASDSNVYDLLKDLEEGIQTLMGRLEDGSPRTGQIFKQTYSKFDTNSHNDDALLKNYGLLYCFRKDMDKVETFLRIVQCRSVEGSCGFGLTPRSLLVGGGGTSESATPESGPGSEPATSGSETPGTSESATPESGPGSEPATSGSETPGTSESATPESGPGTSTEPSEGSAPGSPAGSPTSTEEGTSESATPESGPGSEPATSGSETPGTSESATPESGPGSPAGSPTSTEEGSPAGSPTSTEEGTSTEPSEGSAPGTSESATPESGPGTSESATPESGPGTSESATPESGPGSEPATSGSETPGSEPATSGSETPGSPAGSPTSTEEGTSTEPSEGSAPGTSTEPSEGSAPGSEPATSGSETPGTSESATPESGPGTSTEPSEGSAP

SEQ ID NO: 838 - DNA, 3354 bp, Artificial Sequence
  Description of Artificial Sequence: Synthetic polynucleotide
atggctgaacctgctggctctccaacctccactgaggaaggtaccccgggtagcggtactgcttcttcctctccaggtagctctaccccttctggtgcaaccggctctccaggtgcttctccgggcaccagctctaccggttctccaggtagcccggctggctctcctacctctactgaggaaggtacttctgaaagcgctactcctgagtctggtccaggtacctctactgaaccgtccgaaggtagcgctccaggtagcccagcaggctctccgacttccactgaggaaggtacttctactgaaccttccgaaggcagcgcaccaggtacctctactgaaccttctgagggcagcgctccaggtacttctgaaagcgctaccccggaatctggcccaggtagcgaaccggctacttctggttctgaaaccccaggtagcgaaccggctacctccggttctgaaactccaggtagcccggcaggctctccgacctctactgaggaaggtacttctgaaagcgcaaccccggagtccggcccaggtacctctaccgaaccgtctgagggcagcgcaccaggtacttctaccgaaccgtccgagggtagcgcaccaggtagcccagcaggttctcctacctccaccgaggaaggtacttctaccgaaccgtccgagggtagcgcaccaggtacctctactgaaccttctgagggcagcgctccaggtacttctgaaagcgctaccccggagtccggtccaggtacttctactgaaccgtccgaaggtagcgcaccaggtacttctgaaagcgcaacccctgaatccggtccaggtagcgaaccggctacttctggctctgagactccaggtacttctaccgaaccgtccgaaggtagcgcaccaggtacttctactgaaccgtctgaaggtagcgcaccaggtacttctgaaagcgcaaccccggaatccggcccaggtacctctgaaagcgcaaccccggagtccggcccaggtagccctgctggctctccaacctccaccgaagaaggtacctctgaaagcgcaacccctgaatccggcccaggtagcgaaccggcaacctccggttctgaaaccccaggtacctctgaaagcgctactccggagtctggcccaggtacctctactgaaccgtctgagggtagcgctccaggtacttctactgaaccgtccgaaggtagcgcaccaggtacttctaccgaaccgtccgaaggcagcgctccaggtacctctactgaaccttccgagggcagcgctccaggtacctctaccgaaccttctgaaggtagcgcaccaggtacttctaccgaaccgtccgagggtagcgcaccaggtagcccagcaggttctcctacctccaccgaggaaggtacttctaccgaaccgtccgagggtagcgcaccaggtacctctgaaagcgcaactcctgagtctggcccaggtagcgaacctgctacctccggctctgagactccaggtacctctgaaagcgcaaccccggaatctggtccaggtagcgaacctgcaacctctggctctgaaaccccaggtacctctgaaagcgctactcctgaatctggcccaggtacttctactgaaccgtccgagggcagcgcaccaggtacttctgaaagcgctactcctgagtccggcccaggtagcccggctggctctccgacttccaccgaggaaggtagcccggctggctctccaacttctactgaagaaggtagcccggcaggctctccgacctctactgaggaaggtacttctgaaagcgcaaccccggagtccggcccaggtacctctaccgaaccgtctgagggcagcgcaccaggttttccgactattccgctgtctcgtctgtttgataatgctatgctgcgtgcgcaccgtctgcaccagctggcctttgatacttaccaggaatttgaagaagcctacattcctaaagagcagaagtactctttcctgcaaaacccacagacttctctctgcttcagcgaatctattccgacgccttccaatcgcgaggaaactcagcaaaagtccaatctggaactactccgcatttctctgcttctgattcagagctggctagaaccagtgcaatttctgcgttccgtcttcgccaatagcctagtttatggcgcatccgacagcaacgtatacgatctcctgaaagatctcgaggaaggcattcagaccctgatgggtcgtctcgaggatggctctccgcgtactggtcagatcttcaagcagacttactctaaatttgatactaacagccacaatgacgatgcgcttctaaaaaactatggtctgctgtattgttttcgtaaagatatggacaaagttgaaaccttcctgcgtattgttcagtgtcgttccgttgagggcagctgtggtttctaaggtctgaccccgcgcagcctgctggtgggcggcggtggtacctctgaaagcgcaactcctgagtctggcccaggtagcgaacctgctacctccggctctgagactccaggtacctctgaaagcgcaaccccggaatctggtccaggtagcgaacctgcaacctctggctctgaaaccccaggtacctctgaaagcgctactcctgaatctggcccaggtacttctactgaaccgtccgagggcagcgcaccaggtagccctgctggctctccaacctccaccgaagaaggtacctctgaaagcgcaacccctgaatccggcccaggtagcgaaccggcaacctccggttctgaaaccccaggtacttctgaaagcgctactcctgagtccggcccaggtagcccggctggctctccgacttccaccgaggaaggtagcccggctggctctccaacttctactgaagaaggtacttctaccgaaccttccgagggcagcgcaccaggtacttctgaaagcgctacccctgagtccggcccaggtacttctgaaagcgctactcctgaatccggtccaggtacttctgaaagcgctaccccggaatctggcccaggtagcgaaccggctacttctggttctgaaaccccaggtagcgaaccggctacctccggttctgaaactccaggtagcccagcaggctctccgacttccactgaggaaggtacttctactgaaccttccgaaggcagcgcaccaggtacctctactgaaccttctgagggcagcgctccaggtagcgaacctgcaacctctggctctgaaaccccaggtacctctgaaagcgctactcctgaatctggcccaggtacttctactgaaccgtccgagggcagcgcacca

SEQ ID NO: 839 - protein, 1117 aa, Artificial Sequence
  Description of Artificial Sequence: Synthetic polypeptide
MAEPAGSPTSTEEGTPGSGTASSSPGSSTPSGATGSPGASPGTSSTGSPGSPAGSPTSTEEGTSESATPESGPGTSTEPSEGSAPGSPAGSPTSTEEGTSTEPSEGSAPGTSTEPSEGSAPGTSESATPESGPGSEPATSGSETPGSEPATSGSETPGSPAGSPTSTEEGTSESATPESGPGTSTEPSEGSAPGTSTEPSEGSAPGSPAGSPTSTEEGTSTEPSEGSAPGTSTEPSEGSAPGTSESATPESGPGTSTEPSEGSAPGTSESATPESGPGSEPATSGSETPGTSTEPSEGSAPGTSTEPSEGSAPGTSESATPESGPGTSESATPESGPGSPAGSPTSTEEGTSESATPESGPGSEPATSGSETPGTSESATPESGPGTSTEPSEGSAPGTSTEPSEGSAPGTSTEPSEGSAPGTSTEPSEGSAPGTSTEPSEGSAPGTSTEPSEGSAPGSPAGSPTSTEEGTSTEPSEGSAPGTSESATPESGPGSEPATSGSETPGTSESATPESGPGSEPATSGSETPGTSESATPESGPGTSTEPSEGSAPGTSESATPESGPGSPAGSPTSTEEGSPAGSPTSTEEGSPAGSPTSTEEGTSESATPESGPGTSTEPSEGSAPGFPTIPLSRLFDNAMLRAHRLHQLAFDTYQEFEEAYIPKEQKYSFLQNPQTSLCFSESIPTPSNREETQQKSNLELLRISLLLIQSWLEPVQFLRSVFANSLVYGASDSNVYDLLKDLEEGIQTLMGRLEDGSPRTGQIFKQTYSKFDTNSHNDDALLKNYGLLYCFRKDMDKVETFLRIVQCRSVEGSCGFGGGKLTRVVGGGGTSESATPESGPGSEPATSGSETPGTSESATPESGPGSEPATSGSETPGTSESATPESGPGTSTEPSEGSAPGSPAGSPTSTEEGTSESATPESGPGSEPATSGSETPGTSESATPESGPGSPAGSPTSTEEGSPAGSPTSTEEGTSTEPSEGSAPGTSESATPESGPGTSESATPESGPGTSESATPESGPGSEPATSGSETPGSEPATSGSETPGSPAGSPTSTEEGTSTEPSEGSAPGTSTEPSEGSAPGSEPATSGSETPGTSESATPESGPGTSTEPSEGSAP

SEQ ID NO: 840 - DNA, 3354 bp, Artificial Sequence
  Description of Artificial Sequence: Synthetic polynucleotide
atggctgaacctgctggctctccaacctccactgaggaaggtaccccgggtagcggtactgcttcttcctctccaggtagctctaccccttctggtgcaaccggctctccaggtgcttctccgggcaccagctctaccggttctccaggtagcccggctggctctcctacctctactgaggaaggtacttctgaaagcgctactcctgagtctggtccaggtacctctactgaaccgtccgaaggtagcgctccaggtagcccagcaggctctccgacttccactgaggaaggtacttctactgaaccttccgaaggcagcgcaccaggtacctctactgaaccttctgagggcagcgctccaggtacttctgaaagcgctaccccggaatctggcccaggtagcgaaccggctacttctggttctgaaaccccaggtagcgaaccggctacctccggttctgaaactccaggtagcccggcaggctctccgacctctactgaggaaggtacttctgaaagcgcaaccccggagtccggcccaggtacctctaccgaaccgtctgagggcagcgcaccaggtacttctaccgaaccgtccgagggtagcgcaccaggtagcccagcaggttctcctacctccaccgaggaaggtacttctaccgaaccgtccgagggtagcgcaccaggtacctctactgaaccttctgagggcagcgctccaggtacttctgaaagcgctaccccggagtccggtccaggtacttctactgaaccgtccgaaggtagcgcaccaggtacttctgaaagcgcaacccctgaatccggtccaggtagcgaaccggctacttctggctctgagactccaggtacttctaccgaaccgtccgaaggtagcgcaccaggtacttctactgaaccgtctgaaggtagcgcaccaggtacttctgaaagcgcaaccccggaatccggcccaggtacctctgaaagcgcaaccccggagtccggcccaggtagccctgctggctctccaacctccaccgaagaaggtacctctgaaagcgcaacccctgaatccggcccaggtagcgaaccggcaacctccggttctgaaaccccaggtacctctgaaagcgctactccggagtctggcccaggtacctctactgaaccgtctgagggtagcgctccaggtacttctactgaaccgtccgaaggtagcgcaccaggtacttctaccgaaccgtccgaaggcagcgctccaggtacctctactgaaccttccgagggcagcgctccaggtacctctaccgaaccttctgaaggtagcgcaccaggtacttctaccgaaccgtccgagggtagcgcaccaggtagcccagcaggttctcctacctccaccgaggaaggtacttctaccgaaccgtccgagggtagcgcaccaggtacctctgaaagcgcaactcctgagtctggcccaggtagcgaacctgctacctccggctctgagactccaggtacctctgaaagcgcaaccccggaatctggtccaggtagcgaacctgcaacctctggctctgaaaccccaggtacctctgaaagcgctactcctgaatctggcccaggtacttctactgaaccgtccgagggcagcgcaccaggtacttctgaaagcgctactcctgagtccggcccaggtagcccggctggctctccgacttccaccgaggaaggtagcccggctggctctccaacttctactgaagaaggtagcccggcaggctctccgacctctactgaggaaggtacttctgaaagcgcaaccccggagtccggcccaggtacctctaccgaaccgtctgagggcagcgcaccaggttttccgactattccgctgtctcgtctgtttgataatgctatgctgcgtgcgcaccgtctgcaccagctggcctttgatacttaccaggaatttgaagaagcctacattcctaaagagcagaagtactctttcctgcaaaacccacagacttctctctgcttcagcgaatctattccgacgccttccaatcgcgaggaaactcagcaaaagtccaatctggaactactccgcatttctctgcttctgattcagagctggctagaaccagtgcaatttctgcgttccgtcttcgccaatagcctagtttatggcgcatccgacagcaacgtatacgatctcctgaaagatctcgaggaaggcattcagaccctgatgggtcgtctcgaggatggctctccgcgtactggtcagatcttcaagcagacttactctaaatttgatactaacagccacaatgacgatgcgcttctaaaaaactatggtctgctgtattgttttcgtaaagatatggacaaagttgaaaccttcctgcgtattgttcagtgtcgttccgttgagggcagctgtggtttctaaggtggcggcaaactgacccgcgtggtgggcggcggtggtacctctgaaagcgcaactcctgagtctggcccaggtagcgaacctgctacctccggctctgagactccaggtacctctgaaagcgcaaccccggaatctggtccaggtagcgaacctgcaacctctggctctgaaaccccaggtacctctgaaagcgctactcctgaatctggcccaggtacttctactgaaccgtccgagggcagcgcaccaggtagccctgctggctctccaacctccaccgaagaaggtacctctgaaagcgcaacccctgaatccggcccaggtagcgaaccggcaacctccggttctgaaaccccaggtacttctgaaagcgctactcctgagtccggcccaggtagcccggctggctctccgacttccaccgaggaaggtagcccggctggctctccaacttctactgaagaaggtacttctaccgaaccttccgagggcagcgcaccaggtacttctgaaagcgctacccctgagtccggcccaggtacttctgaaagcgctactcctgaatccggtccaggtacttctgaaagcgctaccccggaatctggcccaggtagcgaaccggctacttctggttctgaaaccccaggtagcgaaccggctacctccggttctgaaactccaggtagcccagcaggctctccgacttccactgaggaaggtacttctactgaaccttccgaaggcagcgcaccaggtacctctactgaaccttctgagggcagcgctccaggtagcgaacctgcaacctctggctctgaaaccccaggtacctctgaaagcgctactcctgaatctggcccaggtacttctactgaaccgtccgagggcagcgcacca

SEQ ID NO: 841 - protein, 1117 aa, Artificial Sequence
  Description of Artificial Sequence: Synthetic polypeptide
MAEPAGSPTSTEEGTPGSGTASSSPGSSTPSGATGSPGASPGTSSTGSPGSPAGSPTSTEEGTSESATPESGPGTSTEPSEGSAPGSPAGSPTSTEEGTSTEPSEGSAPGTSTEPSEGSAPGTSESATPESGPGSEPATSGSETPGSEPATSGSETPGSPAGSPTSTEEGTSESATPESGPGTSTEPSEGSAPGTSTEPSEGSAPGSPAGSPTSTEEGTSTEPSEGSAPGTSTEPSEGSAPGTSESATPESGPGTSTEPSEGSAPGTSESATPESGPGSEPATSGSETPGTSTEPSEGSAPGTSTEPSEGSAPGTSESATPESGPGTSESATPESGPGSPAGSPTSTEEGTSESATPESGPGSEPATSGSETPGTSESATPESGPGTSTEPSEGSAPGTSTEPSEGSAPGTSTEPSEGSAPGTSTEPSEGSAPGTSTEPSEGSAPGTSTEPSEGSAPGSPAGSPTSTEEGTSTEPSEGSAPGTSESATPESGPGSEPATSGSETPGTSESATPESGPGSEPATSGSETPGTSESATPESGPGTSTEPSEGSAPGTSESATPESGPGSPAGSPTSTEEGSPAGSPTSTEEGSPAGSPTSTEEGTSESATPESGPGTSTEPSEGSAPGFPTIPLSRLFDNAMLRAHRLHQLAFDTYQEFEEAYIPKEQKYSFLQNPQTSLCFSESIPTPSNREETQQKSNLELLRISLLLIQSWLEPVQFLRSVFANSLVYGASDSNVYDLLKDLEEGIQTLMGRLEDGSPRTGQIFKQTYSKFDTNSHNDDALLKNYGLLYCFRKDMDKVETFLRIVQCRSVEGSCGFGGGLGPVSGVPGGTSESATPESGPGSEPATSGSETPGTSESATPESGPGSEPATSGSETPGTSESATPESGPGTSTEPSEGSAPGSPAGSPTSTEEGTSESATPESGPGSEPATSGSETPGTSESATPESGPGSPAGSPTSTEEGSPAGSPTSTEEGTSTEPSEGSAPGTSESATPESGPGTSESATPESGPGTSESATPESGPGSEPATSGSETPGSEPATSGSETPGSPAGSPTSTEEGTSTEPSEGSAPGTSTEPSEGSAPGSEPATSGSETPGTSESATPESGPGTSTEPSEGSAP

SEQ ID NO: 842 - DNA, 3354 bp, Artificial Sequence
  Description of Artificial Sequence: Synthetic polynucleotide
atggctgaacctgctggctctccaacctccactgaggaaggtaccccgggtagcggtactgcttcttcctctccaggtagctctaccccttctggtgcaaccggctctccaggtgcttctccgggcaccagctctaccggttctccaggtagcccggctggctctcctacctctactgaggaaggtacttctgaaagcgctactcctgagtctggtccaggtacctctactgaaccgtccgaaggtagcgctccaggtagcccagcaggctctccgacttccactgaggaaggtacttctactgaaccttccgaaggcagcgcaccaggtacctctactgaaccttctgagggcagcgctccaggtacttctgaaagcgctaccccggaatctggcccaggtagcgaaccggctacttctggttctgaaaccccaggtagcgaaccggctacctccggttctgaaactccaggtagcccggcaggctctccgacctctactgaggaaggtacttctgaaagcgcaaccccggagtccggcccaggtacctctaccgaaccgtctgagggcagcgcaccaggtacttctaccgaaccgtccgagggtagcgcaccaggtagcccagcaggttctcctacctccaccgaggaaggtacttctaccgaaccgtccgagggtagcgcaccaggtacctctactgaaccttctgagggcagcgctccaggtacttctgaaagcgctaccccggagtccggtccaggtacttctactgaaccgtccgaaggtagcgcaccaggtacttctgaaagcgcaacccctgaatccggtccaggtagcgaaccggctacttctggctctgagactccaggtacttctaccgaaccgtccgaaggtagcgcaccaggtacttctactgaaccgtctgaaggtagcgcaccaggtacttctgaaagcgcaaccccggaatccggcccaggtacctctgaaagcgcaaccccggagtccggcccaggtagccctgctggctctccaacctccaccgaagaaggtacctctgaaagcgcaacccctgaatccggcccaggtagcgaaccggcaacctccggttctgaaaccccaggtacctctgaaagcgctactccggagtctggcccaggtacctctactgaaccgtctgagggtagcgctccaggtacttctactgaaccgtccgaaggtagcgcaccaggtacttctaccgaaccgtccgaaggcagcgctccaggtacctctactgaaccttccgagggcagcgctccaggtacctctaccgaaccttctgaaggtagcgcaccaggtacttctaccgaaccgtccgagggtagcgcaccaggtagcccagcaggttctcctacctccaccgaggaaggtacttctaccgaaccgtccgagggtagcgcaccaggtacctctgaaagcgcaactcctgagtctggcccaggtagcgaacctgctacctccggctctgagactccaggtacctctgaaagcgcaaccccggaatctggtccaggtagcgaacctgcaacctctggctctgaaaccccaggtacctctgaaagcgctactcctgaatctggcccaggtacttctactgaaccgtccgagggcagcgcaccaggtacttctgaaagcgctactcctgagtccggcccaggtagcccggctggctctccgacttccaccgaggaaggtagcccggctggctctccaacttctactgaagaaggtagcccggcaggctctccgacctctactgaggaaggtacttctgaaagcgcaaccccggagtccggcccaggtacctctaccgaaccgtctgagggcagcgcaccaggttttccgactattccgctgtctcgtctgtttgataatgctatgctgcgtgcgcaccgtctgcaccagctggcctttgatacttaccaggaatttgaagaagcctacattcctaaagagcagaagtactctttcctgcaaaacccacagacttctctctgcttcagcgaatctattccgacgccttccaatcgcgaggaaactcagcaaaagtccaatctggaactactccgcatttctctgcttctgattcagagctggctagaaccagtgcaatttctgcgttccgtcttcgccaatagcctagtttatggcgcatccgacagcaacgtatacgatctcctgaaagatctcgaggaaggcattcagaccctgatgggtcgtctcgaggatggctctccgcgtactggtcagatcttcaagcagacttactctaaatttgatactaacagccacaatgacgatgcgcttctaaaaaactatggtctgctgtattgttttcgtaaagatatggacaaagttgaaaccttcctgcgtattgttcagtgtcgttccgttgagggcagctgtggtttctaaggtggcggcctgggcccggtgagcggcgtgccgggtggtacctctgaaagcgcaactcctgagtctggcccaggtagcgaacctgctacctccggctctgagactccaggtacctctgaaagcgcaaccccggaatctggtccaggtagcgaacctgcaacctctggctctgaaaccccaggtacctctgaaagcgctactcctgaatctggcccaggtacttctactgaaccgtccgagggcagcgcaccaggtagccctgctggctctccaacctccaccgaagaaggtacctctgaaagcgcaacccctgaatccggcccaggtagcgaaccggcaacctccggttctgaaaccccaggtacttctgaaagcgctactcctgagtccggcccaggtagcccggctggctctccgacttccaccgaggaaggtagcccggctggctctccaacttctactgaagaaggtacttctaccgaaccttccgagggcagcgcaccaggtacttctgaaagcgctacccctgagtccggcccaggtacttctgaaagcgctactcctgaatccggtccaggtacttctgaaagcgctaccccggaatctggcccaggtagcgaaccggctacttctggttctgaaaccccaggtagcgaaccggctacctccggttctgaaactccaggtagcccagcaggctctccgacttccactgaggaaggtacttctactgaaccttccgaaggcagcgcaccaggtacctctactgaaccttctgagggcagcgctccaggtagcgaacctgcaacctctggctctgaaaccccaggtacctctgaaagcgctactcctgaatctggcccaggtacttctactgaaccgtccgagggcagcgcacca

SEQ ID NO: 843 - protein, 1117 aa, Artificial Sequence
  Description of Artificial Sequence: Synthetic polypeptide
MAEPAGSPTSTEEGTPGSGTASSSPGSSTPSGATGSPGASPGTSSTGSPGSPAGSPTSTEEGTSESATPESGPGTSTEPSEGSAPGSPAGSPTSTEEGTSTEPSEGSAPGTSTEPSEGSAPGTSESATPESGPGSEPATSGSETPGSEPATSGSETPGSPAGSPTSTEEGTSESATPESGPGTSTEPSEGSAPGTSTEPSEGSAPGSPAGSPTSTEEGTSTEPSEGSAPGTSTEPSEGSAPGTSESATPESGPGTSTEPSEGSAPGTSESATPESGPGSEPATSGSETPGTSTEPSEGSAPGTSTEPSEGSAPGTSESATPESGPGTSESATPESGPGSPAGSPTSTEEGTSESATPESGPGSEPATSGSETPGTSESATPESGPGTSTEPSEGSAPGTSTEPSEGSAPGTSTEPSEGSAPGTSTEPSEGSAPGTSTEPSEGSAPGTSTEPSEGSAPGSPAGSPTSTEEGTSTEPSEGSAPGTSESATPESGPGSEPATSGSETPGTSESATPESGPGSEPATSGSETPGTSESATPESGPGTSTEPSEGSAPGTSESATPESGPGSPAGSPTSTEEGSPAGSPTSTEEGSPAGSPTSTEEGTSESATPESGPGTSTEPSEGSAPGFPTIPLSRLFDNAMLRAHRLHQLAFDTYQEFEEAYIPKEQKYSFLQNPQTSLCFSESIPTPSNREETQQKSNLELLRISLLLIQSWLEPVQFLRSVFANSLVYGASDSNVYDLLKDLEEGIQTLMGRLEDGSPRTGQIFKQTYSKFDTNSHNDDALLKNYGLLYCFRKDMDKVETFLRIVQCRSVEGSCGFGAPLGLRLRGGGGTSESATPESGPGSEPATSGSETPGTSESATPESGPGSEPATSGSETPGTSESATPESGPGTSTEPSEGSAPGSPAGSPTSTEEGTSESATPESGPGSEPATSGSETPGTSESATPESGPGSPAGSPTSTEEGSPAGSPTSTEEGTSTEPSEGSAPGTSESATPESGPGTSESATPESGPGTSESATPESGPGSEPATSGSETPGSEPATSGSETPGSPAGSPTSTEEGTSTEPSEGSAPGTSTEPSEGSAPGSEPATSGSETPGTSESATPESGPGTSTEPSEGSAP

SEQ ID NO: 844 - DNA, 3354 bp, Artificial Sequence
  Description of Artificial Sequence: Synthetic polynucleotide
atggctgaacctgctggctctccaacctccactgaggaaggtaccccgggtagcggtactgcttcttcctctccaggtagctctaccccttctggtgcaaccggctctccaggtgcttctccgggcaccagctctaccggttctccaggtagcccggctggctctcctacctctactgaggaaggtacttctgaaagcgctactcctgagtctggtccaggtacctctactgaaccgtccgaaggtagcgctccaggtagcccagcaggctctccgacttccactgaggaaggtacttctactgaaccttccgaaggcagcgcaccaggtacctctactgaaccttctgagggcagcgctccaggtacttctgaaagcgctaccccggaatctggcccaggtagcgaaccggctacttctggttctgaaaccccaggtagcgaaccggctacctccggttctgaaactccaggtagcccggcaggctctccgacctctactgaggaaggtacttctgaaagcgcaaccccggagtccggcccaggtacctctaccgaaccgtctgagggcagcgcaccaggtacttctaccgaaccgtccgagggtagcgcaccaggtagcccagcaggttctcctacctccaccgaggaaggtacttctaccgaaccgtccgagggtagcgcaccaggtacctctactgaaccttctgagggcagcgctccaggtacttctgaaagcgctaccccggagtccggtccaggtacttctactgaaccgtccgaaggtagcgcaccaggtacttctgaaagcgcaacccctgaatccggtccaggtagcgaaccggctacttctggctctgagactccaggtacttctaccgaaccgtccgaaggtagcgcaccaggtacttctactgaaccgtctgaaggtagcgcaccaggtacttctgaaagcgcaaccccggaatccggcccaggtacctctgaaagcgcaaccccggagtccggcccaggtagccctgctggctctccaacctccaccgaagaaggtacctctgaaagcgcaacccctgaatccggcccaggtagcgaaccggcaacctccggttctgaaaccccaggtacctctgaaagcgctactccggagtctggcccaggtacctctactgaaccgtctgagggtagcgctccaggtacttctactgaaccgtccgaaggtagcgcaccaggtacttctaccgaaccgtccgaaggcagcgctccaggtacctctactgaaccttccgagggcagcgctccaggtacctctaccgaaccttctgaaggtagcgcaccaggtacttctaccgaaccgtccgagggtagcgcaccaggtagcccagcaggttctcctacctccaccgaggaaggtacttctaccgaaccgtccgagggtagcgcaccaggtacctctgaaagcgcaactcctgagtctggcccaggtagcgaacctgctacctccggctctgagactccaggtacctctgaaagcgcaaccccggaatctggtccaggtagcgaacctgcaacctctggctctgaaaccccaggtacctctgaaagcgctactcctgaatctggcccaggtacttctactgaaccgtccgagggcagcgcaccaggtacttctgaaagcgctactcctgagtccggcccaggtagcccggctggctctccgacttccaccgaggaaggtagcccggctggctctccaacttctactgaagaaggtagcccggcaggctctccgacctctactgaggaaggtacttctgaaagcgcaaccccggagtccggcccaggtacctctaccgaaccgtctgagggcagcgcaccaggttttccgactattccgctgtctcgtctgtttgataatgctatgctgcgtgcgcaccgtctgcaccagctggcctttgatacttaccaggaatttgaagaagcctacattcctaaagagcagaagtactctttcctgcaaaacccacagacttctctctgcttcagcgaatctattccgacgccttccaatcgcgaggaaactcagcaaaagtccaatctggaactactccgcatttctctgcttctgattcagagctggctagaaccagtgcaatttctgcgttccgtcttcgccaatagcctagtttatggcgcatccgacagcaacgtatacgatctcctgaaagatctcgaggaaggcattcagaccctgatgggtcgtctcgaggatggctctccgcgtactggtcagatcttcaagcagacttactctaaatttgatactaacagccacaatgacgatgcgcttctaaaaaactatggtctgctgtattgttttcgtaaagatatggacaaagttgaaaccttcctgcgtattgttcagtgtcgttccgttgagggcagctgtggtttctaaggtgcgccgctgggcctgcgcctgcgcggcggcggtggtacctctgaaagcgcaactcctgagtctggcccaggtagcgaacctgctacctccggctctgagactccaggtacctctgaaagcgcaaccccggaatctggtccaggtagcgaacctgcaacctctggctctgaaaccccaggtacctctgaaagcgctactcctgaatctggcccaggtacttctactgaaccgtccgagggcagcgcaccaggtagccctgctggctctccaacctccaccgaagaaggtacctctgaaagcgcaacccctgaatccggcccaggtagcgaaccggcaacctccggttctgaaaccccaggtacttctgaaagcgctactcctgagtccggcccaggtagcccggctggctctccgacttccaccgaggaaggtagcccggctggctctccaacttctactgaagaaggtacttctaccgaaccttccgagggcagcgcaccaggtacttctgaaagcgctacccctgagtccggcccaggtacttctgaaagcgctactcctgaatccggtccaggtacttctgaaagcgctaccccggaatctggcccaggtagcgaaccggctacttctggttctgaaaccccaggtagcgaaccggctacctccggttctgaaactccaggtagcccagcaggctctccgacttccactgaggaaggtacttctactgaaccttccgaaggcagcgcaccaggtacctctactgaaccttctgagggcagcgctccaggtagcgaacctgcaacctctggctctgaaaccccaggtacctctgaaagcgctactcctgaatctggcccaggtacttctactgaaccgtccgagggcagcgcacca

SEQ ID NO: 845 - DNA, 42 bp, Artificial Sequence
  Description of Artificial Sequence: Synthetic oligonucleotide
  CDS (1)..(39)
  modified_base (7)..(7): a, c, t, or g
  modified_base (9)..(9): a, c, t, or g
  modified_base (10)..(10): a, c, t, or g
  modified_base (12)..(12): a, c, t, or g
  see specification as filed for detailed description of substitutions and preferred embodiments
atggctnvnnvngctggctctccaacctccactgaggaaggt

SEQ ID NO: 846 - protein, 13 aa, Artificial Sequence
  Description of Artificial Sequence: Synthetic peptide
  MOD_RES (3)..(4): Ala, Pro, Ser, Thr, Gly or Glu
  see specification as filed for detailed description of substitutions and preferred embodiments
MAXXAGSPTSTEE

SEQ ID NO: 847 - DNA, 42 bp, Artificial Sequence
  Description of Artificial Sequence: Synthetic oligonucleotide
  CDS (1)..(39)
  modified_base (7)..(7): a, c, t, or g
  modified_base (9)..(9): a, c, t, or g
  modified_base (10)..(10): a, c, t, or g
  modified_base (12)..(12): a, c, t, or g
  see specification as filed for detailed description of substitutions and preferred embodiments
atggctnvnnvngaaagcgcaacccctgagtccggtccaggt

SEQ ID NO: 848 - protein, 13 aa, Artificial Sequence
  Description of Artificial Sequence: Synthetic peptide
  misc_feature (3)..(3): The 'Xaa' at location 3 stands for Ala, Pro, Ser, Thr, Gly, or Glu.
  misc_feature (4)..(4): The 'Xaa' at location 4 stands for Ala, Pro, Ser, Thr, Gly, or Glu.
  see specification as filed for detailed description of substitutions and preferred embodiments
MAXXESATPESGP

SEQ ID NO: 849 - DNA, 42 bp, Artificial Sequence
  Description of Artificial Sequence: Synthetic oligonucleotide
  CDS (1)..(39)
  modified_base (7)..(7): a, c, t, or g
  modified_base (9)..(9): a, c, t, or g
  modified_base (10)..(10): a, c, t, or g
  modified_base (12)..(12): a, c, t, or g
  see specification as filed for detailed description of substitutions and preferred embodiments
atggctnvnnvnactccgtctggtgctaccggttccccaggt

SEQ ID NO: 850 - protein, 13 aa, Artificial Sequence
  Description of Artificial Sequence: Synthetic peptide
  MOD_RES (3)..(4): Ala, Pro, Ser, Thr, Gly or Glu
  see specification as filed for detailed description of substitutions and preferred embodiments
MAXXTPSGATGSP

1-27. (canceled)

28. An isolated fusion protein comprising a growth hormone, wherein the growth hormone is linked to an extended recombinant polypeptide (“XTEN”),
wherein at least about 80% of the XTEN sequence consists of non-overlapping sequence motifs,
wherein the sequence motifs are selected from one or more sequences of Table 2, and
wherein no three contiguous amino acids of the XTEN sequence are identical unless the amino acid is serine, in which case no more than three contiguous amino acids are serine residues.

29. A fusion protein comprising:
(i) an XTEN polypeptide with an unstructured conformation, the XTEN polypeptide having a non-repetitive sequence comprising 4 to 6 types of amino acids selected from glycine (G), alanine (A), serine (S), threonine (T), glutamate (E), and proline (P), wherein the sum of glycine (G), alanine (A), serine (S), threonine (T), glutamate (E), and proline (P) residues constitutes more than 90% of the total amino acid residues of the XTEN sequence; and
(ii) a growth hormone linked to the XTEN polypeptide.

30. The fusion protein of claim 28, wherein the XTEN sequence is from about 400 to about 1000 amino acid residues in length.

31. The fusion protein of claim 28, wherein the XTEN sequence is from about 100 to about 200 amino acid residues in length.

32. The fusion protein of claim 28, wherein the XTEN sequence has at least about 90% random coil, as determined by Garnier-Osguthorpe-Robson algorithm.

33. The fusion protein of claim 29, wherein the XTEN sequence is from about 100 to about 3000 amino acid residues, wherein at least about 80% of the XTEN sequence is formed from non-overlapping sequence motifs of 9 to 14 amino acid residues wherein the motifs consist of 4 to 6 types of amino acids selected from glycine (G), alanine (A), serine (S), threonine (T), glutamate (E), and proline (P), and wherein the sequence of any two contiguous amino acid residues in any one motif is not repeated more than twice in the sequence motif.

34. The fusion protein of claim 33, wherein at least about 95% of the XTEN sequence consists of multiple units of two or more non-overlapping sequence motifs selected from the amino acid sequences of Table 2.

35. The fusion protein of claim 33, wherein no three contiguous amino acids of the XTEN sequence are identical unless the amino acid is serine, in which case no more than three contiguous amino acids are serine residues.

36. The fusion protein of claim 28, further comprising a second XTEN sequence that is linked to the growth hormone, wherein the XTEN sequence exhibits at least about 95% sequence identity to a first XTEN selected from Table 3, and the second XTEN sequence exhibits at least about 95% sequence identity to the first XTEN or a second XTEN selected from Table 3.

37. The fusion protein of claim 28, wherein the XTEN polypeptide is linked at the growth hormone N-terminal, wherein the XTEN polypeptide comprises a sequence that exhibits at least about 80% sequence identity to the amino acid sequence selected from the group consisting of AEPAGSPTSTEEGTPGSGTASSSPGSSTPSGATGSPGASPGTSSTGS and AEPAGSPTSTEEGASPGTSSTGSPGSSTPSGATGSPGSSTPSGATGS.

38. The fusion protein of claim 28 or claim 29, wherein the growth hormone is a human growth hormone.

39. The fusion protein of claim 28 or claim 29, wherein at least about 90% of the XTEN sequence consists of non-overlapping sequence motifs, and wherein the content of any one amino acid type in the full-length XTEN does not exceed 30%.

40. A pharmaceutical composition comprising the fusion protein of claim 28.

41. A method of treating a growth hormone-related condition in a subject, the method comprising administering to the subject a therapeutically effective amount of the fusion protein of claims 28, wherein the growth hormone-related condition is selected from growth-hormone deficiency, Turner's Syndrome, Prader-Willi Syndrome, chronic renal failure, intrauterine growth retardation, idiopathic short stature, AIDS wasting, obesity, multiple sclerosis, fibromyalgia, Crohn's disease, ulcerative colitis, muscular dystrophy, low muscle mass, or low bone density.

42. A method of producing a fusion protein comprising growth hormone fused to one or more extended recombinant polypeptides (XTEN), the method comprising:
(a) providing a host cell that comprises a recombinant polynucleotide molecule that encodes the fusion protein;
(b) culturing the host cell such that the host cell expresses the fusion protein, wherein the fusion protein is the fusion protein of 28; and
(c) recovering the fusion protein.

43. An isolated nucleic acid comprising a polynucleotide sequence encoding the fusion protein of claim 28.
